United States Patent Application Publication US 2023/0407243 A1 - sequence listing, part 2

SEQ ID NO: 255 - DNA, 4631658 bp, synthetic construct (residues 1,543,887-3,087,772 of 4,631,658)
  source 1..4631658: mol_type = other DNA
agttgctgagtagctttgcgcatctgcgtgatgacggtacaaccgcatcttcttgctggatctacaccggtagctggacagagcagggcaaccagatggctaaccgcgataactccgacccgtccggtctggggaatacgctgggatgggcctgggcgtggccgctcaaccgtcgcgtgctgtacaaccgtgcttcggcggatatcaacggtaaaccgtgggatccgaaacggatgctgatccagtggaacggcagcaagtggacgggtaacgatattcctgacttcggcaatgccgcaccgggtacgccaaccgggccgtttatcatgcagccggaagggatgggacgcctgtttgccatcaacaaaatggcggaaggtccgttcccggaacactacgagccgattgaaacgccgctgggcactaacccgctgcatccgaacgtggtgtctaacccggttgttcgtctgtatgaacaagacgcgctgcggatgggtaaaaaagagcagttcccgtatgtgggtacgacctatcgtctgaccgagcacttccacacctggaccaagcacgcattgctcaacgcaattgctcagccggaacagtttgtggaaatcagcgaaacgctggcggcggcgaaaggcattaataatggcgatcgtgtcactgtctccagcaagcgtggctttatccgcgcggtggctgtggtaacgcgtcgtctgaaaccgctgaatgtaaatggtcagcaggttgaaacggtgggtattccaatccactggggctttgagggtgtcgcgcgtaaaggttatatcgctaacactctgacgccgaatgtcggtgatgcaaactcgcaaacgccggaatataaagcgttcttagtcaacatcgagaaggcgtaagggggcgaacagatggctatggaaacgcaggacattatcaaaaggtccgcaactaactccatcacgccgccttctcaggtgcgtgattacaaagcagaagtcgcaaaacttatcgacgtttccacctgtatcggctgtaaagcctgtcaggtggcgtgttcggagtggaacgacatccgtgatgaagtggggcactgcgtcggggtttacgataaccccgccgatctgagcgccaagtcctggacggtgatgcgctttagcgaaaccgaacagaacggcaagctggagtggctgatccgtaaagacggctgtatgcactgtgaagatcccggctgcctgaaggcgtgcccgtctgctggtgcaatcattcagtacgctaacgggattgtcgatttccagtcggaaaactgcatcggctgtggttactgcattgccgggtgtccgtttaatattccgcgcctcaacaaagaggataaccgggtatataaatgcacgctctgcgtcgatcgcgtcagcgtcggccaggaaccggcttgtgtgaaaacctgtccgaccggggctatccacttcggcaccaagaaggagatgctggagctggcggaacagcgcgtggcgaaactgaaagcgcgtggttacgaacatgctggcgtctacaacccggaaggggtcggtggtacgcacgttatgtacgtgctgcatcacgccgatcagccggagctgtatcacggtctgccgaaagatccgaagatcgacacctcggtaagcctgtggaaaggcgcgttgaaaccgctggcagcggctggctttattgccacttttgccgggttgattttccactacatcggtattggcccgaataaggaagtggacgatgacgaggaggatcatcatgagtaagtcgaaaatgattgtgcgcaccaaatttattgatcgcgcctgtcactggaccgtggtgatttgcttcttcctggtggcgctgtccgggatttcgttcttcttcccgacgctgcaatggctgacgcaaaccttcggtacgccgcagatgggacgcattttgcacccgttcttcggcattgcgattttcgtcgcactgatgtttatgtttgtgcgttttgtgcatcacaacatcccggataagaaagatattccgtggctgttgaacattgtcgaagtattgaaaggcaatgagcataaagtggcggatgtcggtaagtacaacgccgggcaaaagatgatgttctggtcgatcatgagcatgattttcgtgctgctggtgaccggggtgattatctggcgtccgtactttgcgcagtacttcccgatgcaggttgttcgctacagcctgctgatccacgcggctgcgggtatcatcctgatccacgccatcctgatccatatgtatatggcattttgggtgaaaggatcgattaaagggatgatcgaagggaaggtaagtcgtcgctgggcgaagaaacaccatccgcgctggtatcgtgaaatcgagaaggcagaagcgaaaaaagagagtgaagaagggatataatctcttttgaactttaagctgaaaatggcgctgtaaaaggcgccattttcatattgtagacaacgtaggctttgttcatgccggatgcggcgtgaacgccttatccggcatgaaaacccttcaaatccaatagattgcagtgaacgtgtaggcctgataagcgtagcgcatcaggcaatgttgcgtttgtcatcagtttcaaatggcgctgtaaaaggcgtcattttcatattgtagacaacgtaggctttgttcatgccggatgcggcgtgaacgccttatccggcatgaaaacccttcaaatccaatagattgcagtgaacgtgtaggcctgataagcgtagcgcatcaggcaatgttgcgtttgtcatcagttctaaatggcgctttataaagtgccatttttttattgcgtaaccagacggcgtaatcgcgacacatccactgttttttctgcctctgccagactccaggcgttttgcagattcagccacatttgcggcgaactgccgatcaccacggaaagtttaatcgccatttctggcgtcaaagctgcttttcctgtcagcaatcggcttgccgttgagggagcaatttccattgctctggcaaactcgcgcaggctgacattaagttcgtccagtgattcctgaataatgtcccccgggcggggatgattggccattttcattagtgtctttactctcagtagcgttccttcactgggaacactatcattattgttccttcctacgcaacaataatccatttagccatttcatgttggagagtgtgcgatgctgcgacccgaacatggcagtcgcagcaaaggcctcttagtgacggaaatcaatcaccatgcggccacggattttgccttcttccatctcagtaaagatggtgttgatgtccgctaacggacgcagggcgactttcggcaccactttaccttcggcggcaaactggaaggcttcagttaaatcctggcgcgtgccgaccagcgaaccgaccacttcaataccatccagcacaagacgtgggatatccaggctcatagactccggcggtagaccgacagccacaacacgaccgcctgcacggacagcatcaactgccgagttaaacgcagctttagctaccgctgttaccaccgcagcgtgagcgccaccagttttctcctgcacaattttggcggcgtcttcggtgtgtgagttaatcgctaaatctgcgcccatttcggttgccagttttaactgctcatcattgacatcaatggcgatcactttggcgttaaagacattcttcgcgtattgcagggcgaggttacccagaccgccaagaccgtagatagcaatccactgccctggacgaatttttgacagcttaacggctttgtaggtggtgactcccgcacaggtaatgctgctggccgccgccgagtccagaccatctggcacttttaccgcgtaatcggcgaccacgatgcactcttccgccatcccgccatcaacgctgtatccggcatttttaactgaacggcagagcgtttcgttaccactgttacagtattcgcaatgaccgcatccttcgtagaaccacgccacgctggcacgatcgcctggttttaatgaggtgacacctggacccacttctgccaccacaccgatgccttcatggcccagaattacgccggttttgtcaccaaaatcgccattcttaacatgaagatcggtatgacatacaccacaacactccattttcagcagggcttcgccatgtttcagtgagcgcagtgttttatacgtaacgtcaacatgatgatccttcgtaacaactgcagccttcatagttcctccttttcggatgatgttctgcatagcaggtgaggcaaatgagatttattcgccactacccagtatggatgagatctgaaaaagggagagggaaatagcccggtagccttcactaccgggcgcaggcttagatggaggtacggcggtagtcgcggtattcggcttgccagaaattatcgtcaatggcctgttgcagggcttcggcagaggttttcaccgccacgccttgctgctgcgccattttgccaaccgcaaacgcaattgcgcgggagactttctgaatatctttcagttccggcagtaccataccttcgccgttcagcaccaatggtgaatactgcgccagcgtttcacttgccgacatcagcatctcatcggtgatacgtgacgcgccggaagcaataacacccaggccgatgcccgggaaaataaaggcgttgttacactgggcgatagggtagattttatctttccataccactggattaaacgggctgcccgtggcgaccagcgcgttaccttcggtccaggcgataatgtcctgcggtgtggcttccacgcgtgacgtcgggttagacagcggcatcacgatcggacgcggacagtgtttatgcatctcacggatgatctcttccgtaaacagcccggtctgtcctgagacgccaatcagaatatctggttttacattgcgcaccacatccagcagtgacagcacatcgctgtcggtatcccagtcactgaggttttcgcgcttctgcaccagtttggtctggaaaggcagcaggttcggcatcttgtcagtcagcaagccaaagcgatcgaccataaagactttctgccgcgccgcttcctcgcttaatccttcgcgctgggtctgggagatgatcatttcggcaatgccgcatcccgctgaacctgcgccaaggaagacgatttttttctcgcttaactgaccacctgccgcgcggcttgctgcgatcagtgtgccgactgttaccgccgcagtgccctgaatgtcatcgttaaaagaacaaatttcattgcgatagcggttaagtaacggcatcgcatttttttgagcaaagtcttcaaactgcaacagcacgtctggccagcgttgtttcacagcctggataaattcatcaacgaattcatagtattcgtcgtcagtgatacgcggattacgccagcccatatacagcggatcgttaagcagctgttggttgttcgttccgacatccagcaccaccggaagggtatacgccgggctgatgccgccacaggcggtatagagcgacagtttaccgatcggaatgcccatcccgccgatgccctggtcaccaagccccagaatgcgttcaccgtcagtcaccacaatcactttaatattatggttcggcacgttttgcagaatatcgtccatattgtgccggttctggtaagagataaacacgccgcgtgaacggcggtagatctcagaaaaacgctcacaggctgcgccgacggttggggtataaataacaggcatcatctcatcaagatgattgtttaccagacggtagaagagggtttcgttagtgtcctggatgttacgcaggtagatgtgtttgtcgatttcggttttgaatccctgatactggatccatgctcgttccgcttgttcttcgatggtttcgaccacttccggcagtaaccccagcaggttgaagttacggcgttcttccatgctgaaggcactgcctttattcaacaacggaaattccagcagtacagggccagcgtaagggatataaagcgaacgctgtttttttgtttttggttccatgtcactcactcttttttgaatatccatccctggggggcttttatcgtctttgctttaccgccagggcgtcggcctcaagtataaagcagataaaaacaaaaacaccattgcgcaggcaatggtgtttaatcgtcattgaggactgatggttatgaattacttttcagcggggcgttttctgccggttgggttatttactacgctggatttgtcaccttcggtaactattttgcgctggttagaaattttatggtccagtccaagaatatgacgtgcctgacggttcgatttcattttaactcctcaatcctgtagctagttttaaggacaacatcgccgtagcgaagaaacacgtgctaaacccctaaattaggttgccgatcaagcatagcaccttaaagcgtagggtgctggccactgaccacataattgatcgtttgctggtagatatcactgaggatgtcgttatcagaagcttcaacccatttggtcagctccatgagaatgtcatcttcagtgacaacaccatgctgtgcccgaaggccttgctcaatggcattaaccagagcgggttctgctgttgaattttctgcctgataataagtaaacatagtgattctccgtgtctgtgtatttatggtgtctgctacggatcgcagatttataaagcacattcagcatggcaaatatttgccgcttcgttgttaagattagtcctggttgatgatttttatattttaacaccatgatattcatagggattgtgattggtatgatccgattaatattgatacaatatcttttgggttatatattcccggtaatctattgtgggaatttaatttaagtgcagaagtaatattttcgccggattttattcggaatatcctgcttatcctcgtgctgtttctcacgtagtctataatttcctttttaagcccacaggagagcaacaatgacaatccataagaaaggtcaggcacactgggaaggcgatatcaaacgcgggaagggaacagtatccaccgagagtggcgtgctgaaccaacagccgtatggatttaacacgcgttttgaaggcgaaaaaggaaccaaccctgaagaactgattggcgcagcgcatgccgcatgtttctcaatggcgctttcattaatgctgggggaagcgggattcacgccaacatcgattgataccaccgccgatgtgtcgctggataaagtggatgccggttttgcgattacgaaaatcgcactgaagagtgaagttgcggtgccgggtattgatgcctctacctttgacggcataatccagaaagcaaaagcaggatgcccggtctctcaggtactgaaagcggaaattacgctggattaccagttgaaatcgtaaagcattgccggatgacgcgtcaggcgcgtgaatgcctgatgcgttgttagcatctctacagcgcccgccagcaccggagctcacgtccgtcctcccttattgctaatgattgccggacttcacatccgtgggttgccagcgggcaacgttcgtagaaaaaacagccttgcggcaacgtgcggtttcccggcagatccgttttacgtaatgcccattcttcctccagcggtttatcaatggcggggagggaatccagcaataatcgggtgtatggatgtgcaggtgccgtcagcacctgctgcgcgtcgcccagttctacaatctgcccgagatacatcaccgccacccgatcgctcatatgacgtatcaccgagacattgtgtgaaatcagcacataggtcagcccgtgattttcctgtagcgttaccagtaaattgaggatctgcgcctgaacggagatatccagcgcagaggttggctcatcaagcacaatcacgtcaggctgcgaagagagtgctctggcaatggcgatacgttgccgctgcccgccggagaacgcatgaggcaggcggtcgagatactccggacgaatacccacctgcacagccaactcctctgccaacgctcgccgctgttgttcactactacgcttagctatccagagcggttctgtgatgatgcgccacaccggtaagcgcggattaagcgaagagagcgggtcctgaaacaccatctgcataatgcgttgtgagccagaacggatgtactgcccgtggctcggttgcagcatacccattaaaagctgtgcgagggtgcttttgccgcagcctgactcgccgacgatccctaaggtttcaccacggcggatctgtaaatcaataccattaatggcatgaacatgttccgtagttttaccaagccagtttttacgggccgggaaattgatatggacgtcgcgtaacgttaataacgtgtcagacacttataacctcctgctgcggataccaacaggcacagcgctggttgttgtcaccacacgctgtcagcgccgggacgttttcacactgtgcacctgccgcatagcaacgatcgcgaaaagcgcagccgtcaggcaaatgggtgaggtttggtaccgtccctggaatggcgggtaatagctggcgtggtactccatgttctggtgcgcattgcagcaaaccaatggtatacggatgccggggatgatggataacgtctgccgtcacgccgctttcaattacgcttccggcatacatcacgtaaacgctatcgcacagttgcgacaccacggccatatcatggctgatgaacagaaccgcagttccactggcgcgggctttatgtttaagcaaacgcagtacctgcaactgcaccgtgacgtccagcgccgtagtcggttcgtcggcaataatcaattgcggctcgcaggagaatgccagcgcaatcattacccgctggcgcataccacctgaaagctcaaacggatagcgcgacataacttccacggcatccgggatttgcatctcttccagcaggtcaatcgctttagctctggcttcccgacgacttattggttgatgatggcggatcacgtccatcatctgaagacctattcgacgtgtcggattgagggcggtcatcggttcctgaaagatcatcgccactcgtgcgccgcgccactgacgaagctgtttttcccgcgcgttaagaacatcttctcccagcagggaaatctgcccccgatgtacgcaataactgcccgtcggtagcagacgcataatcagcattgcggtgactgatttacctgagccggattctcccaccagaccgacaatttcaccgcggttaatctgcaaggacacattgttgagcgcgtgaacatcaccgttaaaaccggggaaactcaaatgcagttgttgaatgtccagaacgggttgggtcatgactgctttcctcctgctttcgggtcaagcagatcgcgaataccatcaccaaagagattaaacccgacggcggtaagcaaaatcgctgcccccggaaatgcgcaataccaccactgatcgagtacatagttgcgaccatttgctaccatcgcgccccattcagcactcggttgttgagcacccaggccaataaatcccaacgtggcggccattaaaatcgcgctaccgatatccagcgatgcctgcacgatcagcggcggtagggagttacgtaaaatatgccagttgatcagatgccaacgagacgcgccaaaggttttcgccgcctgaacataggtatactggcgtacaactaatgcttgcccccgcgccaggcgcacataaaagggaattcgcacaatagcaatagccagcatggcgttaaacaaactcggcccgagagcggcagccagtgccattgtcagtaccaacgaaggaatcgacagcataatgtccatgatgcgcatgatgatggcgtctgcgcgtccaccaagcacaccggatagacatccgagtagcgaaccaatcatacccgcaatggcaaccacgactaatccggcgagaattgattgctgactgccgaccagtacgcggctaaacagatcgcgtcccacttcatcggtgccaaaccagtgcgccgcagaaggcggcaaaaggcgggcggttaaatcaatggcgttgggatcatgcgtcgccagccacggtgaaaaaatcatcatcaatagcattaatacaatgatgactgcgctggtcacggtgagcggactgcctttcagcatccataccagttttgcaccgttaaatcgcgtttgtttttgtgggcgtacggcggacgtttcctcgcttagcatcattcaccacctccacgtccgatacgcggatcaatccacaaatagagcaaatccaccaccaggttgaccagcacataagcaaatgaaaccacgacggcaaagcccatcactgccgggaagtcgagcgcctgtattgatgttactacccatgcacccattccgggccaggcaaaaacggtttcggtgagcactgcgccatacaacaaatcgcccagcgccaaacccaatacggtaatcgatgggatcaacgcattgggtagcgcataacataaaacgatataccagccgggcaagccgctggcccgggcggtacgaatgtagtcttcactcaattgttccagcatcgctgagcggatctggcgagcgacaattcccaggtgaacgaacgccagcgttaatgccggtaagatgagatgttgcaacgcattgaagaagacttcaccgttgccttcaagcagcgcatcgagcagataaaagccggtaacgtgcgttggtggatccagccagtcatcaagccttccgccgccgggaagaatttgcagatgaccataaaacagcacaatgacgcccagcccaagccagaacgcaggtgtggagattccggtaatggccattattcgcaccagatgatccagccagcgatttcgccagactgcagagagtatgcccagcgggatgccaatcaggagtgccagcagcagggcaccaaaagccagctccagcgtcgccgggaaaaatatacgcaactcttccagcaccggacgcccggtacgaatggatgttcccaggtcaccatgaaacaggtcgctgacgtagcggtaaaactgtacatacagtggctggtccagtcccagttgctggcgaatattttccacgatagcatcgctggcgcggtcacccgccagtaaccgcgccggatcaccagggatcagatgcgagataataaacgtaatcacgcagacgcccgccaccacgagcaccagcccccagcagcgttggcgtaaaatactccagaaggtcacgttatttactcatggtattgatattgaagacctgttccagcatgggattgaacacaaagcctttcacctctttgttcatcgccagttggtagtttttctggaacaggtacacataagcagcgtcatcaatgacgattttctgtgcctgctggtagtcccgggtacgctgcgtctggtcggtggtcgcaagcgcattgcgcagtaacttatcgacctcactgttttcatagaacgagcggttacccggcagaccttttttgtctgactcaaaccagtaattcataaacatatacgggtcggcaaaatccggactccagttgccaatcgcaatgtcgtaatcacctttacccactctgtcgcgcatggtggcgttcgccagcttttccagcttcacaatgatgcccagcttgttgagactggattgtgtcgccagagcaataggctcccagttcggatcgttatcggagtagagaaacgtcaggctggtgggtttgctcgtcactttatcccattcggctttggctttcgtttcgtcatggttgtattgcattgccgtcgcatcgtagccccacatgccttccggaatcgggccgcgcatctgttttccgttaccactcagaatgccgttaaccatgccctgataatcggtagaccaggaaatggcccgacgcagatccgcctgattaagaggcgctttgctgttattcagatacagataggtaacgcgcagtgacggatactctgccacattgactttattttcctgcttcagggcgttgagttgatccaccggcagcgcatcggcaatgtcaatgtcgccacgggagagctgcaggcgacgggaggcactttcaccaataatttttaccgatacccgtttgaagttcggtttattgcctgggtaatgcggatttggcaccagaactaattgctgacctttttgccagcttttcagcataaatggtccggaaccggcggtattttgcgcgaggaagccgcgagcatcatccgctgcatgttcctttaagaccgccggattgataatggatgcaccgtcattcgccagcgtgtagaggaacggtgcgaatggttggctaagggtaaacttcaccgtatgttcgtcgggagcatcaatctttaaatctttgggaaatgcttctgctggcccctggccgatttttagtagccgctcaaaagaaagttttactgcttcggcagtgacaggtgtgccatcggcaaatttagcattatctttcagggtgaacgtccactctttttgatcgtcagacgctttccagctacttgccagatcgccttcaacgtcggttgagcctttatcaccgtccgttttgtactgaaccagccgctgataagacgggtaggtcactgtccagtcgttattatctattgttaccgccgggtcgagggtttgtggatcggcggccttaccaatcaccagcatatcttttggtacggcggcgtgcgcaaccgggaaatttgtggcaaggacgagcgcgagcaatgtgggacgaaacgatatcgatctcttcatgacagtttcctgattaactgacgtgctgtgtgccaggggatataaaacaagagaattgatcagcgagcagagggtaactcgctgcctggggtaattcgaagtgccaccattcgctggagataccgacaaaaccgccaccagtcattatcgcattcagcaacagccgattgcgctgagcggcgggcgggacggaagggtgataggcatgggagcgctcgtgcatttcatcgaaccctgcgcccatatcgaggatgttcccgtgctcatcacgaagcgtcaggtcgatcgccgtgccacggctgtgattagaaccgaccgtcacatcaacaacatattgcgggtctgggcaggcttgccacaacatcgcctgtgcttgttgtgggcgatacgcatcgtaaatcaccagttgtaaccctgacagctgggcgatgctgatacttttcgccagcgcggtaatcgcatccttgtgtaacagacaacgcgcttgctgataaatagctttacctgtgatgttatcagcgcaggcgtatttcaattcgatctccagatcagggaagattacggctaaatcaaccagttcggtggtatccgacataaacggttcctgtataagacaaaaattgctgcgctttccgcttatgcagatctcatgccatgccgggataagcgccagaatgctggcttaaagttatattttttaacttttgatcaacatttgtgcagcgtagtgcagttttggtgcaagaggggaagttaaggaaggaatctcccggaatcgtagctgaaatcacagtatttaagtgacagtgtcacgttaaatgaaaacccgcgagtgcgggcgagaggaatttgtcagattttcagcggtaacacgctgctcatccagcctggaatttcttcggcgggtagggggcgggaaaagaaatatccctgaataacgcgacagtggatcttgcgtagcatctcaaattgctctttggtttcgacgccttccgccacgacggttaaattgaggctttgcccaatgctggtaatggcttcaagtaaggcaaggatgcgtttttcggtcagacaacgatcgacaaaacttttgtcaattttgatttccgttaccggaagactgactaagcgggataatccggaaaagcccgtaccaaaatcatctaccgataagcccacgcccatatcacgcaggatctgaatgcgcttaaagatttcggtatcgtgttccatcatcatgctttccgtgatttctaccgtcagctggtggccgtcaataccccaggcgtgcattgcatcagacacctgattaggcagttgattactgcgaaagtgcagcgccgacaagttcacggataacgccgggatatgaatattctggctacgccattctgctaactgacggcaagcttccgcgatgacccagcgcccaatattttcgatttcaccaatctcttctgcgagaggaataaaccgtgaagggggcacatgaccatgcaggggatcgtgccagcgagcaagggcttcgatgccgtacagttcacccgtttctgcgaagatttgcggctggtaaaccagtttcagttggttattgctaatcgcttctttcagcgctgcgcctaaaaccaaacgctcttttaccatttcgttcatcgccgggctgaagaactgccagccgttaccgccattcttgcgaatataatccattgcattgtgagcagtggagagcaagtaatcgcggtttttacccaggtcgtagctgatgccaatactcaaggtaagcgggaagggtttatcgtcaatcattatcggcttgctgaccacattccgtagctcatcggcgatttgggtaatgttactgacgtcgttttcgaggctcacgaggacaaactgcgtaccttcgatacgacagagatactgatccggtttgagtttttcacgaaagcgattgaccacttccagcaatgcctgatcggcccacgcatagccaaggctatcaatcacatcctgaatatggtcaacaccgatgagatacaccacgggagagacggctttgtcgaccaggtcatcgaggtaattgtgcaggttattgcgatttggcagaccggtcatcggatcaaattggatgagttgttcaatatgctgacggcttttttcctgttccagcgccagcgcggccatatgctggctgatatctgccacgcgttcgataaaggcgctggtttctgctcctgacgaggttttaatttgcaggatccccgcaggcgcgccatcacgctgacgaatggtcgctgaccagctttgcgcattttgaatttctgcaccgtgggaagatgacgcccagtgtatcggcatcccgttgcgcagtgcgaacagcgaaacatgcgattcgttgagtacagattcgatgttacgacaaatgatttcccccatttcatgaaatggcgggctgctgcacatggcggcgagaatattgccttcaagctggcgaatctgccgttcttcggtgatatccgagaaagtcattaccaggttctgcagatgcgcgagcacgtcataaaccgggctgatagaggctttaatccagattttttcaccggtgcgcgtcaacagcagaaattcgtcctgatcgcgggcggttttccatagcaactgttgtaaacgaatgcggttatcggcagggaattcaggaatgttcaggagtgtatcgggctgcataccgctggcttcgctaatgcagtaaccaaacatttcggtaaatgcgcgattgcactgcacaatatggcgttccggatcgaggacaatcaccggtcggtcgagatggtcaacggcaataatcaattgtcgggtctgttctttttgcgccatttctacgctggcatcccgtaccagcgccaggtaataaactttcccctcggcgctcactttcgatagcgcaaaacgggtccagattttactgccgtcttttttctccagctgcagctcccgactcatcccctcaacacgcgctttaccgccttcacggttgtgacgaatgtattcaggatgcgcaggacgcaaatcccgcggaatcagcatatcaatgttattgccaatgacttcttcacgtttgtatccccagagcttctctgcggcggggttgaaaaacatcacttcatcattttcgttaattaacaccgcacccatcatattttgctcaagggcggggaaaaaaatgccatcggcggcattatccgcatcggttagcttcatgattacctctgcatcctggcgcatctaaagactggctttccagagttcaacacggtttctacctcgtcttttggcgatatacagagcttcatcggctatttgaatgaggcgctcatagtcaggatgaccattaaacatggcggcaccgatggaaagtgagagggcaatatcttcgccgtttgcggctttcagtttggttttctccacccgactgcgaatacgttctgcggtacgtaacgtttcgttttcagaagcttcagtcaaaacaatgataaattcatcgcccccgtagcggaaaacataatcactactgcggacgttgtcataaaaggcctgagagactttacgcagaatttcatcaccagtgttatggccccacgtatcgttgatctctttgaatttatcaacgtcaataatcagcactgacagcggtgtaccggtccggttggcatgggcaatttcgcgtttgaagatagtcggtaggaaacggcggttaagtaatttcgtcagtacatccataccgacttcgtggcgcgatacttcttcaaacaattcacgcagcaaggtaataatttgcgatacggtatttcttatctgtaataaaaatttcacccgcagacttctgttattcaaatttctggtgttacgcatggtttgattgaaaataccgtcgaaatcctgaatcagacgggagatatggcctacttcggcaataccactaaaataatgtcgacctttatggttaaaccacaggccaaaatcagcctggcttaaaggcaaactactgcctaaatcagaatccagcaggattttatagataatatctatttcccatgaaagtattgaggctatttgccgttctttttcttcttcggcgttttccagtaacgagaagatacgatagttttcatcttcctttgaggcactactgtcactaaaggtaaacgcgcgagtcatcacttccatcgcgatatcaatactgttaatcgagaaatggtagacctgaagtttttctgcggcggaataatccgaagagaagatcaccggatagaggatttttttcagcacccgaaaccccatctcgacaatttctaccggaattcctatgcgggcatgcacttccgcgacggtatgctggatttgtattagcctttcgacatcgtcaacctgggcagaaagcacgttaataatccagcgttccatcgcactcttcaactgccgctcaacttgttcattactcaagaattcttcggcatgcgggtcgatgcggacaattcgataaaactcgatactcagataatgagcatgcgcaacggcaatttccgcggctttagcacgaatgggcggatctgcctgttcgacaagtccggtccactcatctttcattcttttaaaatacatctccataattcacacccttataaggctgggaaatcagacggaatcaaaatgaaacgcaacgtgcgagatcgactaactgcaccatattctcctgaaatatgaagatatactgaaaagaaataagcgatttaggacagtttcaatctacgctactgttcttcagaagagtatagcccatcgtaattatttttcggtgacagcgaatatcgtatggtttttcatattcatacatttttattagggatttatggctgtttaactaagtgtggttaatttgacttaagtaagcatgattattagtgggatagtttaagagggtaacaagccggtgggtaaagcaccggcttgttacaaagtaagaatgggagtttaactgccccagcgactttgcagatagctgaccgcttgttgagtctgcggtttattcagatagtcctcacggaacaagatggtgccgctaatttcgggcacagcatcgttaagatcgagctgctttttcagttccggtacgccgccgttaatcatccagtctggctctatctttgaaggttcacccactttatagaaggcgataccgatatacaggcgggtcctggtcggtttaacgacatccgcccaccattttgccaacacgtcataacgcgcggcactccgtgagaacggccagtaaatttggggagcaatgtaatccagcaatccttgttccacccatcgacgggtgtcagcgtaggattcgtcataggctgccgcgcctcgggtatcggaaccgagcggatcgtgtgatcggttacgccacacgcctgccgggctaacaccaaattcgactcccggcttaatgcttttaatggtgtgcgatacctttgcaattaactgctgagtattgttgcgccgccagtctgcttttgacgcaaatgcgcctccgtatttacggtacgtttcgttatcatttagccgtgaacccggtgactccgtatagaaatagtcgtcaaactgcacgccatctacgggatagcgggaaaccacttctgcgactattgatgtgatccagtcctgaacctcagggatgcccgggtcgaggacaaagcgatcgccagacgttctgatccagtcgcggtgttgcacatagacgctcgccggttgttgagacagagtgctattcagttccctgatagtaccgggcttcgtattaaccgatacgcgataggggttaaaccaggcgtgtactttcatcccacgcttgtgggcttcgtcgagcataaattgcagcggatcgtaacccggattttcaccaatcttaccggtcataagatcggaccacggcaaaattttcgatggccacagggcggtaccgtccggcttgacctggaaaaagaccgtgtttatgccgagacgttgcagatgatccagtttgtcgatcatcgcctgttgttgtacacgggcccggctggtggggttactaatgttaaccgaggaaaccggtggccagtcgagccgagaaaccgtggccagccagatgccacgcatcggttgtgacgattgttgcgtcgtggctggtggctttgaacctgctggtggtgtcaccatggactctggaggcgtgcttttacaactacacagtaaaagtgccagtgcaactagtatcgctggtcttctaatcgttaatttcttgtttcgggagcagatatccatatgtgctggtttccggtaaacagatgtgcgctcattctcgtacttatccccgttaagtcaatacgacagcaagcacgaaaaagggagcgatgaattatcgctcccttgtcttataaccattcagacatggttagtgtttcttgtcattcatcacaatatagtgtggtgaacgtgcacgcgggtgcaggaagaagtgaccttttggtgcgttctgactgttgattggctccagagtgacgccggtatttgctttgcctttacgatcatgaacagcatagagaataaagggcagggcaagtaccaccaggaaactaacaaccagtaattcaacatacatatcggtagaatcaccctggatgttatccggcggcaggaaggaaacaataaacgccataattgaagtcagcagaccgacaattgccacgaccagtttcacccctttaccaccagggatattaaatgtgcgttttaagtcaggatgtttaagaaccaacacaatgtagccaataaacagcatgaaataagcacacagataaatcaccaccgtcagcgccagtgcgatcaggaaggacatgttgttaccgccaccggtattggtgaggatgatcaacgcgatagacgtaatcaccagctgcgaaatgaccagcgttaccggtacgccatttttgttcattttagcgaatgccgctggcagcaggtttttctgcgctgttacatacatcccgcgagaaggaccaacaatccaggaggcgatttccgccagaacacccagcaacagcagtgcggagatcacgcgaaccgtccactcaatttctggtgccacatgggacatcagaacggtaaaggtttgcattacccctgcggagaggttgatttcattacccggaatgaccatcgcaatagacaaaccaccaacagagcttaagcagattgccgccaccatcagcagtaacatagccaacggatagtcgcgccctgggttgctcatttcattgacgtgggttgcggatgcttctacgcccatataactcaaaatgaaggcaacaaatactaccagggtgcccactttagagaagtcagggaagaaggtcttcgaatccatttcgatagcaacgggggcaccggagtgcagataaatagccgctaatgcgatcaaaataaatgcaggtaacaggataccggcgaagaagccaactttagcaattcgcgccgtgtatttcgtgccaccaaactgcgttaatgccagcgcccaaagaatgatgagtgctgcaatagttttggtaatggggtcttcattcagcgctggccatttcaggatgtaggagagtgcccctaacacgaaatagagcatcggaataaaaccaatggcgatttgcagatagccaaatgagatcgctgcaaatccccatctcggccccagagtatttgatacccaggcgaagacaccaccttcttcccagccgtcgacggtggccatttccgcagcacaaagtcccacgggaataaaccataaaatcccgcctaatagcaggaagaagactaatgaaaagcccgatgttgcgaaggtagggtattcataaacagccattaccatcgatgccgttatggcaaagaatccaagtaatgtgagctgcttagctttacctgtctgtactgatgtagccatattatccccctaaaacggtattcctgtcggaaccgcacctgttttgttctgaagcgtattcagaacaatattttccgttgctaatgccagtgaacagactttggaaattgtcccgaaacgggttcgtttcgggacaccgttaccgttaaacgttatcaggtatgtttaaagctgttctgttgggcaataccctgcagtttcgggtgatcgctgagatatttcagggaggctttgtagtcttccagcaacagttcagcaaagtccatttcgaagccgcgacgacacataatgcgcatcaccacgatgtcggtggcttcaccgccgagagtgaaggccggaacctgccagccgcgcagacgcagacgttcagagaggtcatacagggtgtatcccggatcttcaccatctttcagtttgaagcaaaccgccgggatgccttcgtccgggcgacccgtacagatgaactcatacggccccagtttggcgatttcatccgccagataagcggcaacctggtaagaggcgttctgtactttggtatagccttcacgaccgaggcgcaggaattcatagtactgtgcaattacctgacccgccgggcgggagaagttgatggcaaaagtaccaatttgaccacccaggtagtcaacgttgaacaccagttcctgcggcagcgcttcttcgtcacgccagataacccagccgcagcccagcggagccagaccgaatttatggcctgaagcactgatcgatttcacacgcggcaggcggaagtcccagacgatatccggggcgacgaacggtgccaggaagccaccgctggcagcgtcgatgtgcatgtcgatgtcgataccggtatcggcctggaatttatccagcgcatcgtgcagcggttgtgggaactcatagttaccagtgtaggtcacgccgaaagtcggcaccacgccgatggtgttttcgtcacaggcttcaatcatgcgtttcgggtccataaacaactgaccggggcgcatagggatctcacgcagctccacatcccagtagcgggcgaatttatgccagcagatttgtaccggaccgcacaccaggtttggtttatccgttggtttgcctgcagcttccatacgcttgcgccaacgccatttcatcgccatcccgccgagcatacaggcctcggaagaaccaatggtgttggtgccaacggcctgaccatttttcggcgcaggcgcatgccacagatcggcaaccatatttacgcaacgcaggtcgatggctgcggattgcggatattcttctttgtcgatccagtttttgttaatggataaatccatcaatttgtggacattttcgtcgtcccaggtctggcagaaagtggccaggttctgacgagcgttgccatcaagatataattcgtcattgataatctggaatgcgacatcgtcgcgcatttcgtgcagcggaaaacgttttgattctgcgatagtggaaatagacttcgcaccaaaacgtgaatcgagtagttccgaccttaaatccgttacttgcttcttatccattttaaactccttaaaatgattggatcgcattaaaaaagtaggatttatcgataaagtaagcaagtgcaaaggactcgtgtttaaataacaaaatcctaatgttatttatcgtgagatattacgcgaataatattttttcattgaaaaacaatacaatatgaaattcttgggtggtggtaaggtgttttatgctgttatttttatgcgcattctgtgtctcctgaattatcacgtaaaaatcagaccttaaaatatcactattagtacttgattattattttgaacgcatttataaaattattacataaaaatagcgaatattgctaaaatccccgccaacgatgtgttgacggggctgttattattttggcaataatactccggtataagtatttaccggatgagaaagatattgtttaacggcagtgttaacattctctaccgtcatttgtttcaacaattgctcctgctcagtccatgctgcaggatcgtcatattgaataagactatttacaatagtgttcgctaattgttgaacgctacgctgttggatatcgaggctgcgctgaacgttttgctggtattcattcagttcttgctcactgatccctttagccagacgcttaaccatcacttcattcgctaacgttaacagttcatcatgtcgttctggttgacaagtaaaagccagcaaatgactgatatctttggcctgaggatcaaccgagaggcgagaagaaacgctgtatgctccagatgcctgttcacgaatattaacacgtagatcttttgccagtgcgacgttaaaagcatcgagcgccatacgcgtcggcagattaacaggtgtccgggaatcataacgcttccactgtgaaacctgtgccacaggttcattttgttcttttacagtaaccgatgcgttgtccgtcgcgcgagttaatggtttacctgcggctaatggcgaatcagagtgtttgattgatcctaagtaacgcgtaattaacgccacgagtttgtcttctgcgacattaccgacaatgacaaacgtgatatccgctggagatgaaaacaattggcgatcggcagccagcgcatctgcggcagtaaactgtgcaatctgattttcttgcagtaatttcgtgcggtcatcagcatagcgcgtctcatacatctgctgggcgaatttctccgctggacgctggtcgagcgttttcaacgcctgaatttgagcattttgtagcgatgcccaaatattatcgttaatcgtgctgtgggtgattcgctggttaatcaactgaaaaccaggttcagggttattagtccgcgcgctaacggagagcaacgtattcatgccactgactttactgctcatggttaccgaattttccgcactccagcgtttcaggctggaagaggagagttcgccaacgccgcttccgctaactgctttatttgccagcgcgataagtgatttttgctgcgcagggaaacttaaatcgcctttattcgatacggcaataatttgtagcttttgctcttcacccgcggattttgccagaataaccctggcaccattggaaagtgttaatgatgtcagattctccgccagcgtttctttgctgctaatttccgcctgtgggtctgcgtctactgttaacgataaatttctgcctgggaagacgtaagccgccagctttttgttggcgtactccttttccagcgccaggatagccgcaggagacaatgcttttttggcggcaacctcattgtttaccatttgctcccaaaatgcgtcctggttctttcttaactgctgccatttttccgccagactttgcacggtaatttgctgccacagacgtttcgaaagttgatatgtctcttccggcgacaagaacggcgtattatttaatgagctggatgccaggcgactggtcagcatacgtaaatcacgttcagcttgctgatcaaccgcatttttcagccaggtgaggcgggtagatttgacatcatcgagttcttcagcagaaaaaccatgctgatcaatggttgccaactctgccattaatgcattcgcagcatcctgcatattatcgtctcgtgcatttacacggaaaaacagcgactgataatcgggtgcaattttaacgctgcgcgcagtgccgccagaaatagtcttcaactcgcccgactgtatgcgttcctgcagacgttgattgaacagctgaactaacatgctccattcagcttgttcgataaagctttgctcatcgttcacttgtaccattggcaggcgataatagagtgcgatgccgttcacccggttttctttatcattaatgatattaaagcgcaggtggttttcggcttttgtcggccagacgcgattttcagctgctttgttagccggaagcttacttaaattatcctttatcagcgccagcgcttctttactgtcgatatcgccgaccacgataaaggtcatattatttggttgataccagcgttgataaaattggcgcaattgtgccggtgtgaccgtggcgacagtatccatcaggccgataggttcacggtctaaattacgggtatttgccagcaggaaagggcggcgcgcctgagaggtgcgccatttcgcatcctgatgggcacgccattcctcagtaattacgccacgttcagcgtctacttcgagtttttcaaaggttgcggcattactccattcactgaagattgccatcacttgttgcagattttgtttctgcgtagtcggcaaactcacctgatacaccgtttcgtcatagctggtataggcattaacatcgcgaccaaaacgcaggcccattgactcaaatgtttcgatgactttattacccggccatgtttttgtgccgttaaacatcatatgttctacaaaatgagccacgccgagctcattgtcttcttcctgcaatgaaccggtatgaatttgcagccataaatttacctgatcctttggatgagcatgcggataaatcatatatcgcaagccattgtccagttgcccggtaattaacttttcatcctgcggtaaggcggcggcaatcagccgcccggggagcaacagagttgccactaacgtcagtaagaaacagaggtttctcataattatctccatgcgaaaaccgggcgaatttacccggttaagtaaaatccgaactattaaaatttcatgctgacatcaagccagaaagtacggccactggcgtaggtcgccacaccggtgttcgttgtatcaacagcggttttgctatccagtacattgagaatatcggcactgatcgtcaggttttgttgttgcagaaattgtggcgtccaggacaagcgggtgtcccaggtcaggctgctatccagtttttcgtcaacatactgcttgtaatctgaatattcgctgatgtattgcgcatttgtcttaccaaggataatgcgagctttacgcgcttcttgccaggccagcgtattcgcccacactaacccgctcggttgatgcgtgaaatccatgtttaaggagatctttaatgggttattaaaatctgccactggaacgctatcgtaagagaccagattaccgttataaaccacctggttatcaccggtattgctctcctcataaccattgtttaacgacaagttgcccttgctcttgatatagctaaagacaatttgtgggttaatatctacctggcggatatgcaggggttcggccagttcaaaactgaggctgaacgaatgcgttttggttttgccatcgttgttatattcagtaatggtggttttagtcgcgctgtcggtacgactgcttttgctgatttgatcatgcgcttcacggtaaacatagtttgcacgcgcaataacgttcttaccgattttctgctgcaatcccattgccagttcatcgttataaggcgttttcaaatcctgataacgcgtcagagttttattacctgataccgattccgtccagctattgcggatatcacgtaatcccatatcaagaatattcccgccatagtaacggttataacctgctgtaatcattgaggtttgattagcaaaaatatcccattccgtcataaagcgcggggagatattgtggtttgacagatagttgtcatagtcataccgcacgccgggcattaatgacacattacgccagctaatgcgatccgccatatacagcgtgtagttgtcaattcccaggcggcctttacctttatggtaaatggtatggttagttttctttccggcagcattaatcacataggattcagactggttatggcgttcagtccacgcatcggaatagatgtattccgcgccgaagtagggttgatgcgaaacattacccacggcgaatttttgccagtccaggcgtgttttgaaggtgtaattatctacagcctgggaaatgtgtcctaatccgccacgggtgcaacgccctgtaatatcaccatatgtacatgaaagttcggtgtaccagatgtcatgatcgtgacgggtataatcactaatatgatcccaaccaacggtggtacgcagtttggcccatgcgagctgcgtatccatatcccatgccagaccataggatttattacccatttcgcgatcagactgcgggaaggtgctggtattataatcacggctggagccggtatattttaaggttaaatcgtgggtaaagcggtcgctggcaaaccaggtaaatttgcttaatgcagtatcgataacgtttttatactgtgcccgaccggcgacaatgccgtcattcgaaacataatccgcgcgggtgatatcagactggcggcgcgataaaccggcggtaacgccgaagttatcagcgagttcctgattaaacgacaaggtataaaagttctttttaaaatctggggagtaataagtacttcctgaagagccttgattaaatgcgctcttgttattctcatcgatatgcgatgttaaccagtccgaacgcgtagtgcgataacccaatttcaccttgctatcatcagcgttgaagcgtttgatctttgcatcaattaccccgccattgaagcgaccaaattcaaccggcacaaaactgtcataaagcgtcacattgtccagtaagctgacatcaagataatacccctgtgacatcccgctaatattggttgcactactggcatcggactcattcgctgggttcaggttattagttgcactaataccgtcaatcaaataggcattctggtagggcgacgcaccgtgaatagagattttctcagggcgaatatctccctggttcaacgaggtactttgcgttgaatccatgcgtaccgcagggttggttctcagcagatcgctgatattgccattcccggtcggtaaacgctcgatgctttcactggtgtaatgcgtgttgccgtttacgggtacagggacaggagcatagaccgtcatctcttcaaaaaaatgcatgtacatgtttttgtcatcgacggcctgcgccacatcagcgccacataaaatgacgccaggaataagaactcgcttcatttatttatatctccgtacagcagggcttttattgtttttataaaaccgcgctaatgtcacaaatatcatcggccaggttccagacaccgggttgatgtgtaaccataatgacgccgcttgtgggtagtttttcacgcactaaacgcagtaagcggatagcctcttgttcctcaagatgagaggtagtttcgtcaagaaatatccatttcggacgtcgtaaaattaatcgtgccagggcgatacgttgtttttcgccgctggaaagaatatctccccagcgatcgtggtcatgaatacgcgcagccaatttcccaagaccaacctgatgcagtacttcgctcaacgatttatcgtctacgggcaggggaagtgctttacaaataatctctttcagtaagccggttttgattaacggtgtttgtgacacataccaactgtcagcaggagaagaaatatcacctttaaaccacggccagcagtgggataatgttttaagcagtgtggtttttcccgcgccagagtagcctttcagtaatagccatttgcctggcgaaacatgaaagttcaggttctctaatatgatcttattatcaggcgtacgaatactcgcatcagccacttgtaccgcatgttggcaatttttaggcttattcgtagggcgctgttcagtgagttgatggaactcatacaagcgatcgataaccgcagccagttcagcaagttcgtcatatttataaataaaccagcttaaattgttcgataccagcataaatgcctggcgcgatttcatcagtccgcccagattgatctgcccgctaataaactgcggcaataacagaaagtagggaagaacgctaagcgagcgcgaataaatattctgccagtaatcaagccaccgctgacgattcattaaacgatgccagttctctttaatggtatgaaaattgtcgctcaactcctggcgttgtagagactcagcattgcttagcgcaatcagttctgcctgcttattatgctgcacaagatttgttcgaaatgtcgcttcgctacgttgtttttccacattaagcggacgaatacgtttacccaccttatgggtaaataaagttccaccgatcacaatgagcacgacggtatagaccatatacccctggatattccattctgttccaccaacagtgaatgagagcgtacccgcgctttcccaaagaataacggtaaaggtgatcagcatgctaagtgactggatgaagccaaatgaaagactgagcgttttgctgatcagtaagagaatgtcttcagcgatacgttggtcagggttatctgtatttttatgctcgccgtagatctgcgtgaagtagtagtttttatctgcaaaccaccgattaaggtagtaatctgttaaccattcgcgccagcgaatagtcagtagtttaattaaccatgttttgtttacggatattaatacaaagatccccagcagggcagggaaccaaaggacaagctgccaaagcttatcggtttctttctggcttagcgcattgaaaaaatcattattccagtcgtttaaccagacctgaattttaaccacgccaaggatcatggcgagttattattaatttaacaacactgaagttttattattcttacgcagccaaaagggcttcaacagacagagatactttgctatcaacatacgaagcgtaatgggaatggttatcattagcgaaaattgattgtgccatccaatgattatctatggcaatgatttactgatgaaatttatttaagtatcatttaacaatatgaaatataaaggaatatttcattttcagtggttatggttatgctattgataatcaaggatattgctaatgccctgatgcataccacgtaagccaggattttcgcaagggaagatgatgatgacgaaacacccgacaggaatttatgtcgggtgccttgttaaggtcataagaaggaggctaagaatggagttaaaagagagcgttattaattattctccatttgttttgcaacatccataatgtggtaaagcggtactctgttcttagctaactctaccatggcgttcatataaggtaccatggttgaaaaaaggattttataaccttcgcaaaaataagaaacagtctcattgtttactttagtaatacgatgcttaggacaaccgccattgcagataggtttatatgcacattgctgacatttcgctggaatccgttttttttgcgctgtcagttgtacactgttcatcgttttgagttcagatttattaatgtttccaattttgtactgtggatagacaaaatggtcgcattcgtaaatgtctccattactttcaacaaccagattatccttgcaggactcctggaaaatacaactggtatgcccattccccaaaaaacggctgacaaagctttcaaactgacggatgaaaatttcacccacatcgtttttaacccattgcataaaaatggttgacataaacttgccataagccgtgggaggcacagaaaaatcaatgatacggaatgtgttctcactatgaccactgaaatcaatattcggcgtcccggtttctagcaattcgataaattgcatatgtttactgccgatagattttaaaaaatgataaacctcaagagggtaatggacattaacgttattaatgacggttaacgtattaaactctacttgatatgatttcagacgctcgatggctgctatcacttttgcaaaagtaccgttacctgaattactgcgtctgtaacggtcatgtaactcctgggggccatcgatcgagataccaaccagaaattcatgttctttgagaaaggcacaccattcattattcaataaaatgccattcgtttgtaatgcattaaaaatacgtttttggcctgcatagcgttgttgatagtgaataactttacggaaaaaatccaggccagccagagtgggttcaccgccttgccaggtaaaatagacctgattgccagacgctgcgatatattgtttgatgaactctttcagagtgctgtcatccatccatttttcatgagtaaactgcgactctttttcaaggtaaaaacagtaatcacatttgagattacattgaaaactggagggcttggctgtaacgtgcatcgctatctcgctcaataaggcggcggaaaaatccgccgcatgaaggtttagttatttcgcttcgcttagtgctttcttgatattgttaaacttctcctgatttacctcgctaagcggtggctggctgctgtcgataaactctcttaccacgccttgcatctctttaacgacctgcggattggcggcggcaaggttatctttttgctgtagatccgtcagtttgtagagacctaactgattgttttctactgtatagacaagcgaataatcgttatttctcaccgtataagagaattggcttaagtcctcagtgttggggttatgcgggtaatcgtctgactgatggcgaacaaatttgtggtaattatcccagaatggaatattttcctcgtcaaaccagtgagaataagaggttatccaggtcagatttttatgtggctcgccttgtttcttatcttgcaaccagggcagcaaggaaacgccatccagcttaaggtcttttggaatgctgatatcggctgcatcaagagctgtcgggtagaaatccattgcggaaatcagcttgtcataattaccgggttgaagttttcctttccaccacataaacattggggtgtgagtaccgccaggataggtctgactcttatagcctttttgcgccccgttcagcggcagaggaccatcgataaccgcaccattatcggaggtaaagagaataattgtattgtcatactgtccgtttttcttcagttgttcgagaatgcgttttacaccctgatcaacagaataaacggaagcgtagtagttatctgctgtttgactaccggtattaaattgcttctgatattgatccggtgcaggattatcatttggcaggtgcggagcattataagccaggtaaagcataaaaggctggtcaagtgttttggcacgatcaacaacgccaattgcctcatcggttaactgatcgctgatataaccttttgcggggacacgttcacgatttttgaacagtgaaggggagttgtaatatgccgttcctgcagcgtggaatcccataaagtaatcaaagccacggttttgaggttgccattcttccgcagaaaatgtggtgaagttgtcatgatagtcacgcgtttgtttatcttccggtaccggcacattactgatttttgacaagtgccatttacctactgctgcagtgtaataaccatgattctggaataattcaggcaagaaagtttctgttagcggaataccatcctgagcatcggtattggaatagacaccaaagcgggcgggagctcgaccggtcattattgcggcgcgggaggggccggaaacaccgtgtgccacatagccgttagtaaaacgtacgccttcatccattaatgaaaggagcgtcggcgttgatttttgtgcagcttcaatggctttatctatccctattttgtaggtatcgacaacttcacgattttccattgtttttgggtcaaaagatcccttatcaaaaggaagttgtccataaccaagatcatccatggtcagtacgataatatttggctttcctttggtactgtattctgtcggcgtaaagtctgagaaagcaacgtttgttttggttgctttcagctttacatcatctgccgcatgagcagcaaatgcagccataccagatgccagtatcaaagatatcgaggtacttacgacacttttctttaatgcagacttcataaatgttcctcttcttattgtacttaattccaaagtaattttacgaagagaaataagtggatgtaagtgaagttagtcacataaagagatagcagatttagctaaaaaaagggaaaaaacagtccataaagcgttgacattactttctgttctattaagtaatttctcgccgataaacaactaatttattgatatttaataaattattgcattttactgacaaaatgcagaattgagatcataaataatcatgcaacaggttatgcaagtgcataaatatgtgatggatgtcacttatttatttcaataaatatatcgcctaaaaacaacgcggggcagggaatggctgccccatttaattcttacgcagcgtgtgtggttgactactcgttagcaaataatcaaatagctaaagcattcatcgtgttgcccgtattcatacccgtgtgactttgacaacggtactccttagaaactctcttcggactgttgccgaaatgtttgcggaacgcataaataaaataagatgtactggcataaccacattgttcggcaattttattgactgaaccttctacgcgtatcaaattttttgcgtgctgcattcttgcatctaaaagaatctgtgagaatgtcgtttgctcttgcttaagttttttcttcaacaggctttcactgatgtacaggcagtcacaaatatctttcagcttccatgggtgcgccggcttcatgttgacaatatttctcactttcccagaaacggatagcacaccgttagttaatagtgtaatgaaacctttgcatgcggcaaaaatagacaggcaagaaaaaagcaaaagttctgaaaaattatgatgattgcgttcttccgagttgagataagcaatcatttcattaagcaatccagtcggtacatttgaagcacgtaaaaacttcgcaggaacaggcaccgtcactgtctggatgttagtgcattgtagatattttttaatggtattttcagtaaatccgatctctttaaaatgccgctcataaggttcaaaatgcgtacgaacagcgttatctaccatcaggatctcgccgtcagagaaggcgtaatctttatctaaaatgttagcgttgaaggcatgatgaataaatataacagaacaaacgagcgacattttatctccttaaaacaataaagtttttatcgatacttttttaacatttcatatttataatttgctgtttgttttcagccttgcaaactattgataatgaaatgtgtaagatctcttgcaatgcgacccatttctgaaatactcagctgatcaattgccgaaaaaatggctatcaacgtaagtgtcagtaataagacaaccacaattgcagacatgatttctttatagttgtctctttgcgtgattttgtttttcactgtggtcgcatgcatttcaaatatgtttatttagcggataacgttaaaaatcgttaatcagtatgcttaatataacaggctggagaaaagaggaaataggactggtgcttcagtactgagcggagtttcttacagctgtaggcagaagtttatatcttatagtatgtagtttaatttaatccatgtgagcaaattgcgaaataatagtcaatgaggaattcttctgctgtgcggatgacagcagaagaaatgagaagaggcattaatttgatggttctaattcaaccggaatacttttatagccaggaatgccacttaatggatcgtggttatcaagtgttagcatgtgattcgattctggaaaataggtcaccagtgagcggtcagccatagggtaaatgaccacttttaatctatccatgcggcgtgagctgcgcttaccgtctggcgtaagcgcaataagattaactctttcgccgttttttacacggcaaattttagcttgtttagcactcataaagaccacatctcgttgaccgaatacccctcgatagcgatcatccataccataaatcgtcgtgttgtactgatcgtggctgcgtactgtcgccatgaccagcttactgttaaacgctgaagagggatcttctaacagccctttgctggtaatgaaattagccttacctgacggcgtcatccagcgcctttcagcagctgcatttatcaggtgaaaaccaccgggatgacggatgcgctggttatagtcggcgaactctggcagcacagcttcaatgtcattgcgaatgcgatcataatcttccaccagatactcccaggctaccacgctctggggtagtgctgcctgcgcgattcccgcgaccactgcacactctgatttcagcattacaccggcgggttttaacacgccacgcgaggcatgaatcatcgacattgaatcctcaacggttaccgcctgcgcaccgtttttttgcatgtcaatctcgctacgtcccaggaccggcagaatatagctatgccgtgcggtcaacagatgagagcggttaagcttagtggctacgtgtaccgccaaatctaattgcgttaacggtacagcgctcgcttcccgatctggcattgccagcgcaaaattgccccccatgcagatcaatgctcgagcctgccccgtacatattgcttgcatgctggcaattgcagcatgtccaggtgcatgaggtggggtgaagccatagcgctcacccagacgagccagaaactctgcagacggtttctcggtgataccgacggttcggtcgccctgtacattagagtgtccacgtagtgggcagatacccgcaccaggcttgccaatgttacctttcatcaacagcagattgaccagttgctgtacgttctgggtaccatgttcgtgctgagtgatccccattccgtaacagataatggtgcgttcggcagcggcatatgcgtcagccagttcggcgatttgtgtctgacttagtccagaaatacgttcgatatctttccactcggaattgagaacgtcacggcgtagctcgtcaaagccgacggtatgcgtttgaataaactcgtcatcaagcaatgaaggccgacctgcggcgcttgcagcatcatcgcgctcaattaacaggcgcatcatccccttgagcaacgccatatcgccaccaatgcgcacgttatagtaggcactggccaactgagtctcagagttcgtcagcatttcaaacgggttttgcggtgcggtaaatcgctccaggccacgttcctgtagaggattgatggcgatcattttcgctccccgtttcactaaagcgcgcaacgaagtcagcatgcgagggtggtttgtaccagggttatgcccaatgcaaatgactaaatcgcacttctcaaagtcttccagcaacacggtccctttacctacaccgatactcgctgccaaacccacgcttgtcggttcatggcacatgttggagcagtcgggaaagttattgctcccgtattcacgggcaaaaagctgataaagaaaggcagcttcattggaagtgcggcccgaagtatagaattcaacctgattgggatcactatagctttgaaggcgtgcgccaatttcgtcgaaagcttgttgccagcttaatggcttgtaacagtcgctgacggcatcatatttcaaaggctgagtgagtcgccccgcagcctcaagctcgtggtctccccaggtaagtaatgattgaaccgtattctcagcaaagaaagaggcgtttacctgcttatccgtgacttcccaggcgattgcttttgcgccgttttcacaaatgtcgaatgacgcactgtgcttaggatctggccatgcacaacccggacagtcaaagccctctggcttattcatgtcaaacatggcaataacatcctggcgtatatccatctgcttacgtactgcattcgctacggatttaacagcaccccaaccacctgcagcaccctggtaggattcaatttttttcttcatctacttatcctgtgtggaaatgaattattaggatttgtaatagcgatgatgcacagtacatacaaagggattatcgccaacatggatatataagagtaggggactactctctttctatttttaatctattatcgttaaacaatagattaaatacgataagttaagcatcatctctcatagtgtttaaattaacatatttttcaatataaaaaataagactctggcttcaattgtgcgcggattttcttacaggtgtaggctaatagccttcacaaaataattatccgcgcaattttcgtgaatggagcgcatagactaaggtcaaaatcacaattattcatagataaaagtgacaccaatgactgactggacggttccggctgaaaccttgtttcctgtttgtccataggttgcgcttaaacccagaggtactttgcttttatttactgtccccagggagacattttctcccgtagccagtatttttccattacgcattagagtgacacccactcccgatgcttttgttgcatcaggtgctgtgttagcaaacacttgtcggctactgtcagtggtggcacccgaaagataaaatgagagcttttgttcgcttgagcaatatacgccaaggggtatttctgcgcttccaggaaagtccgggagatccacggtgacatttcgactatcaacggtgcagccgcctgttggcataacaacattgttatttgaaataatattccacgtaaaattacgcggatttccgcttcctaatgttgcaattttatacatatgaatacgggcaatgacttcccccgcttttatgacaactccaccggccgccccaactggggtaatatagagttttaacggtaatggcatcggtgtcttatcaccaatatccaatacgttggtatttgtcgtcaacgggaaggggtaggtcacattattccagtacagcgatcctttatatgactgtagggagcctgcgaaagctgagccttgtaccaggtttatatgatcagtgtcgtaccagccgccgtaatcattccagcaacttatatgctgagacaagtctacaaccagattctggcccggctgtattacagggtcgagattaacataaacagaggttgtacctgctccaatacttgacccgccatcgacattacaactgaaggcaaaaactttgcctgccattaatagaagataaataccgaacaggacctttatactgattgttttacccatgatatatcctaaggttaaaaattgatttaaaaagaaggctaagaaaatcgaatcgacgttattgccaggtgtagatcacattgattagcgcctcgatcgttccctggcttgcgtttccattcaccgtgatagctcttgccttaagtggaaactgtgcattacgagtgatctcatcaacaataaccgttttgctatcgccattttttaacgcagcatcctggtcatccctcagctctatctgaatattttcggcagtaccttcatttttgtaataacccgtattgtcagttgaacctgtcacgattgccgtcactgcacttgtttcaaccggacaatcggttaatgacaaagtaatattgtgccagccagatgcagaaccaggttgttgcagattgcgcgtataaagatccccgagattaacgttagcttctttggtttgaatagtgcagggtttagcgactacccgaccattaacagtgatagtgacatcggcggcctggagagttgctgtgaataacgcgcaaaacgtagctaacaggaacctcttgtgaagtcttttcatatctgactctgattattgaaattcaagggtaaaggttgccgaagccctcaccagtcccggattgacggacttctgagttgacttcagacgagcggagtaaggcaaaatattgttctgttctggtaccagtgggatccactgcatcccggcatgaagatcattcagtttcaccggacgcatatttgcgtccaatatttctatacccaaaccggaggccgtattgcttccttcatccagtttcaacaaagtattattttctgcatcctcaataccgttaaatgcaacccgaacccccgttgtccctttgctgcattcacttaacgtaatctgaaaagggacggctggacttgtgctaccggtcgttggaaattgtctggcactgtttttttggagatctacggtaaaattaagcgaatccgatgagactgtgcagccataatcgaggacgcgcccgctaattttaataacgctatctgcggataaagcagaataggtggttaaccccagacataaaccgaggaaaataatgttattgtatttcataatctattgttccttagcgacagattgctgtctgctggttcagtaaggtaccaggagaaacttcaggaagcttgtactcgacaatacagtttgagtttttatctttgccccatgaaacctgtaattgccctgactgtggaagtccagtcagataaacctgaccattttccgcgacaatgctgccatttttattctctccgtgtgtgacaattgcaccgaatggaacgctcttattaccgtacttcaacgtcattaatactttcccgccgatttgtgcattaaatgttgctctggcaatagcaccgtgagttgggatgacagtgaccacggtttcatccagttcaacattatctgcaagggaattcgcgttaagagcaacacggttttctctatattctgtcgcaaatggtaatatggcatagccacgccagtcggtatgaattccggtctggttctctattttgacattatcagcaccaggagccttaaccagaaccattgtgtcgcccagcggctgtccaaaggtgatgccatcagcatgagcaataatcccaccactcattccgtaataaatctggctgctgtcaccactccgactgtaaccgacattagtattaccataagctccacgataattaagagaactgtaaccactggtgccagacgatgtattacctccgtgggtgttaccgacctgaacgctataattcaggttattatccggcagcagagtgccataaacccccgatagattggtcatgccgcctttcaaatcgtttgacatactgtaactggcgtttgaattacgaaatgccgactgactgtctgtacgcatccaatgactgaagggaacattaagcgtaaaagcgagtaaatgatcccgatcgttttgccatatattattggaatagctgtaattcagcgaagtcgtaatatcaccaaacggcacatttaatccaaatgatatttgctggtcgctgcgtgacgtgttccagtaactttggcgactggcactgaaaaatgtcgtaccgtaatttccaagctgctgagagatgcttatttgttcctgaccacgcttactgtagaacagattaaaataatcaataaattgtgtctgctcattggtgtctccggtaggaggcttgacggtgtaaccactcattcgactgtaggcactgtcggataagttataaaaaccttgcgtagaatagcgatatcctgcgacctggatattggttccacaacaagtttattgctgcacttgttgaagagagtatttgcaaaaacattttatgtcgctaaataacatgacgatttcattatgcatgttatttataaaccgtgactaaacagaatattattgcgaacaagggaagtgtcaggaaaggtcaagagctaccaatggttaatatggctataaatcattagctatggttaatgtttgcttgctgaaactaacaccgaattgctctaaacagataagtgcagggtttattaaagctgtccgacagactttcttaacctggtaatatctctcttgggtgactctccaaacatccgcgaatattcccgactgaaatgggatagctttcgtaaccgacagcataggctgctgtggtgacatcgtaatgttcattcagcatctgtcgcctgacttcattgagacgtagccatttctgataccggagtggactcattcccgcttgatccgtccttaaataagtaacagcaccctctggtgttttcgtatgcagtgtctatgcgacagacactgcgctcttagcatggggcagggaataaccaggctatttctccatgcacaggccaattatgaaagaggagaggcttaagttcttgaaccctgaacgaataacgactaccagaaaagcacttcgcatcactcagacatgatttaacataatatacattatgcgcaccaatataaaccaaggaagaatccagtcgttggcggtcatgattgtcatgctcattaacaatgaccaaaccccatatctcacttactaccgtattctcggcttaaccgtccatgcaacctcaacacattgctttcaactgccgtcaccacgttctccggaaaatctgtcggtaatgaagtcttcacgttatccagtgctgctggaatcattctggcaaagtcactcaggatttcatgcatctgcacttccgggaatctcagcacctttgctgtcgccaaaaaatgtcgcggataaattttatcgattgccgtttttttgcctttggatgcgttaagccccattgccagtttgagatcgctgatgtgtattcccgtaccgccaaggaccggaaatgctgaaatgatgtcgtaaaatggcgtgagtcgataactgccgccagcctgaataaatacggagaagttttttgcatgaccgtccgttgcgccaatcaaccactggaagacctggaatttcataaaatcatagcgatctttcagcgcctcgctggaccccatcaaaaaagccatgatccgcgcgatgcctgggcctccatctgattcatatttcaccgatgaaggtaaaccgaatgtctgacacatatcctcctgtggcaagcgaagtaaaaccgttcgctcagcattccaacgcctgtcaaaacgttcgaccgctaacgcgcgcacatttcccgctttaatgatttctgcgtccggaacattcaacccaagttctttcgccagcagcagacagtaatactcattatcaacgctttggctgagatcgagcgtcgcattgggctgcctgatttcgccaatcggtaatttaatgatgtgcgtcgtcggcgttattcctttcggaatgcaccagtcattgcctattctgagcagtgctgtcttctcctgtgcgccagcaaccgagatgcgaaagtcattttcttctctaatcatgcctagcgggatatctgctttataagccgttaatacttcttcaagtctggcttcagtaagcttttcccatgccattatcggatgcgttacggtttcgtcttcgggtattaacgtcacggcaccaacgctgtctcgccctatttctgacaataaatcaaacggttgtctggatttggcatgataacgtttaacgatccggtcacgtacaatcgggctatcgggtaacaggttatcgaagaagttaaatacggcatcagaggtgatattccccctctgcaatggcagcgaaagtgacaacggtctggcataacggcttgctaaccactccggtgcatacttaaaggtgtgcgcgccgttggctaacttcgttaactcgcctacccgctggttgttcatccaagtgacaagtttaggcattaccactccagattttgctgttctgttgattctggcgaggcatttttcgcgtcgcatagcgtcattgagagttcaagcgactgtaaaatcttaaaaaatgtcgtgagcgtggtattgtcagggttgttttcgaaattggaaatcgtcgcctgcttaataccaatttttttcgccagctcgctctgcgtccagccattttgctggcgaaccagtttcattgcattcgccaattgcgttgggctatagatcttctgaaagctcatcatgtcatacgtccacagcaagtttatccgcttaaggggatattataagttttatcctttagtgaggataagtcaatctggaaacacatcttatccgctctacgggataaacgctgcgatatccgcgatcgcggataaaaaggaggatttaaataaggcgttgatgcgccgtttgaagtcggcaatattaagccgcatgccatctcgacatgcggcttatacggtttaccagctatatttcactcccagcatgccctgagtatcgctatagcctttatcacctagttgcacaccgacattcccccacaggctaaggttgttatttactttcgcctcaaccccggtacgtacttcaccgagattacgcgcaccttcacggcctacggtttgaccattcatcttcacggcgtagactttgctattgttgatccagttcgcttcaatgtaaggctggaactcacgctgtttaccatcgtcacgctggtgatggctgttcaggtaggttttcaccccaagtcgcgtttgcacatttccgtcgccttccgtttcaatgcgcgttccgtctttccgggtatggtcggaatctttcacacccatccaggtgatttgcgcctgtggctggacgtaccaggtattcagcgtcccttcgctgccgctaaatgttcccgcttcaaaggtatacccaccctcaacagaggccgtcacaccgcgagaatcatagtcgtcagcagaacggttatcggaactgacgctgttatcaaaccagttatacagcgcccagctgtcaacataagcgccggtcttattcgcatcgttctgataccaggtcgcgtacagcccagcgctgtaaccgctgatgcgcccatccgatttataacccacacgattactctgagtattactgtgctgattggcgtagcctgccatcacgccaagatgccagcgatcctgcgcgttgctactccactgcgccaaatcgccgcctagctgcaatacatagcggttagcctgagtatttagctgaccgtcaccggcccttgaacgttcgtgccctccgacatgacgcatccacatactgcttgccgacccctgagaatgcagtgaatctgtatactgcggctcacccagacggtcgtgtaaacgatggctaaacagcgagttggctgcggcaatgttgctgatatagcttccggcctccgggcgataaactgatgggccttccggatccacaacagggggattattgatgggatcgggtgtatccgctggcgttacgccgtcccatttactggtcagataccagtttttctcgtcattccccttccctttagccagcgtgtagacgtaagccccagcttcgacagttccggtggtcagcgcgaagttacctgcagaattaccgccaacctcaatgagttcaataccgttgaccgtttgtgcaccgacgccgccaatgttatcaacccgaacgcgagtgttcccttgggtatcgcctttcacgttcatcttatcggtgggcgaattatcgccgcccagcgtcgcgttgaacgtcatcaggccattgtttccggtatagttgccgttaacggtcagtacattccccggtttccccccttcgctattcatttgaaccgtgccgccattctccaggttgccgccgatagtggttttagcgacacgcagtgccccccccaggcataacgttcatatcacctgcagtggtgacatttcccgacatcacaccgctgttatggatattaatgtgttgacttgccatattaatggcagagtcggaaccgaaagcaatttccccccccacgatatccgtcgtaccctgatacgccgcggaatcgttgttaagagtcaggatcccggtacccagttttgtcacatcaccgctaccgctgatactgtgcgtcatcgcccagctacgctcagtggagatggtgagcaggccattattgataacggaagcatcacccaggtttttctgctcgttgacgctgagcgcgctgcctgtatcaatgttgaattgccccacaaagcggctattatcgccatccaactctacatctgtcctggcggttgcgctcacgatacccttcccgcttatgctattacgcagttcgccagtcacgttttttagcgttaacagaccgtcattggcaatatttcctctgcctaacccctgagtattatcgaggctgacttccgcatttgggctaatgctggttaacgcattgtagcgtgcattaagcccctcgatagccagcgttccccctgtaacattcaggtttccgccacctgtcagttcaccctgactgatcccacctttatttaccgtcagcgccccctctttgaacaaaacagtcgaacccatctgcccggtgaatgtctctaccgtctgcgtcgatccattaagatcgacgatggccgcgttgctgatgttcagttcccgggtgttgccaagtgcaccatccgcatcggtacgtaatgtccccatctgaacgtaggttgccccctgatagtcgttctgaccgttggaaagcgaaacctgtcgcaccgtattgattgccagatccccttcaccaccgatttttgccgacatatcggccgttgcgccataggctccgccatgttcggctaacgtcagcttttgcccaccatggatgttcagcgctttcagcccatagttaacgtacaaaccattacctggtgcggtcgtgaggcggaatccataatcaccctcggcgaccaccgttccgttttgcgcaatgtgtaacgttttgtccgcttccacctcgtcgccctgtaaatcacgtaacgttaatgagccacccgacccaataaccgtttgcgccttcaccagttgaacgccgacatggctatcgtcgtgttccagcaaattgagcgtcgtcagagggttattcgccatgggatcattccacggtttaggcacgtcgataagcacgtcgcccgtcccgtttacctgatagttacggcctttccaggtgtagtcacccgcgccgacaaccagcgtatcgacgctgatatatccctccgcgagcgtcgcagcaggaatatccgtatcgaaaatgatggtacctccattcatggccagtccaccaatggattgctctccaacttttaccgatgtggtattttcactgtcagactgcaacatcgcgtgagtaagcgcagcggtgttgtcgcgttccagagtgaaggtactgtctttcagttgggcaacaccggcgaattcagtccctgttgcatgggtaaagccaaacatcttgtcggaggatgacagctgcactcgcatcaagccatcgcctttgagcgcattggtcagcgtgtaatctcctgcactgttcgttgatgcgagaatgtcgagcgtaccggggtttgcaatggttacttcactcgaccccatgcccgttaccccatctgccgtatgagacgcaatggtcaggaggccgtcattgaccagcgttttaccgctataagtattccctgcattgaacaccgtatggcctgcatcatggatcacttttccgtctttatcgtcacctgtaatcagcatatcgacctggtagccggcatcactgttattggtatgattaaagacaaaaacgccttcgccaagaccaaactccactttcgtcgcattggtgataaatccggcatctgccgccgcctcaccgtgagcagcaccaatgtttagcgttcctacagcaggctcaaaaacacctaagtaaacttctccaccttcgacattcagcgtaccgttattcgtcagggttaacgtacccgtaccagatgtccctacgtacatattgaatgtttcaagaagagagttctgcccatccaccctcacgtcgcccttacttttgtcattgagagctatctgtgtatcacgcgctttaactatacctccggtggtaatattcagttcacccgtgcctaatacaccgacctgtagcaattgtgcgttagtagatgatgtctttaaattccagagactgtccgttgaaatattaactatccccttaccggaggcatttcctccgataaatccatagcccgttgaattaagggtggcaccattactgacatttacgataccgctaccaaaattaccgacattgatacccacagtatcgaacgatgatgtcgcatccatcaggttcagtgtgccgataccgcttgctttatcgcccaaaaaagtaatattttgcgatacgaacttaccgccatcgctaatattgaggtttccgacgcccgcaacaccaatggtggtatagacattcttattgacctcccacattccccccgtggtgatgctgacattcccgacgccggtttctccataaccgagtgaacttcctccgttgctgacaacaagcccctgattactgatattcatttcgccgtggccgtcataaccaagattagttccgagattagtgataacggagttcttatccttaacagtaatgttgcctgtgcctgtttctttcatccccgcagtgataattcccgaatctactttgccttcactcgagacattaagttcaccgtcgccagcatcaccgatatagatatagcggaaagcttcgcccgttccgaggaaattccaatgccctttatcggtcacgttgacgacaccgtgggaaccgtcctgaacgcccaccaatgaatattctttgttattaatcagtccattattggaaatattgactgtgccattaccgaaatatccattatagagtctgcgtaccgtgatgacagagtcttgatcctgcacattcagggttccgataccggtggcattgccaccgataatcgtattttcagccgtaaccaaccccccctcgcgaatagtcgcctccccagttccttgattaccaatttgaaattcaattgaggaatcattattttttattagccactcgccacccttttcaacgacaacctggccattactgcccgcctgatagcctaaaatggcgacgattgaactcgtgacgtaacccttatccgtaatatttaatgaacctgtgccatagctacctatttcgaataattcggtcgtcagaacagagtcctctccctcaacattgaccgtcccgacgcctcctgtcgaagaacctaatcttaaatagcctccatcgacgtgacccttctgtttaatattcagcgtccccgttccggattgacccacatttaaaggccttgcattatttccgctatcatacaatcgccaggtgccacccaaaacattaacggtgccctctgagtcctcattagcgccaatgacgctggtagtaatagtggttaaggaggcattaccgccagccaaaatattaagcactccagtgccataccagccaaccaggtaggcatcataagcaacatcagtatcaatattggtaatctgatcattatcaacttccagacttgcaccagacgctgaaccgcttagtgccagcaaaacacccagcgtcaatctactgaatttcgttgtcagtccagaggatttacgcaaattaaccgtcgatgttttacctgccctgcgagttaattccgagcaggcctgaaatacctgtagagtgcaattccatatcacgcgatagattctattcatataaacgctccatatacaaacaatacagccacgaaagagatgagtcgtcagacattaaaaatgaaacttattaaattgtcagaggtctgtattgagtgttagttggaggtgggaaggtgtcaatttggctaatttgctaatgctttcgaattgatagattaaaaattgcatagttcttattttatttaaatatgaactatgagttattgttgcttaataagaaaactgtttctttcaataggaaaattatcatcatcatatttaacaaagaatagcactaattgctaaaaatcgaagtttattaaaccccttttgcatccattagtgtctttaggaatattcgctataaaataagggttgtgcttaatgctttaagaaaaatagcaattttcccttgaatatcgtactggtgatggaacgatgaatctgcaagctggcttttaacaagccagctctaaaagaagggaaataagaataactatactcaaaaactaacagccacggtcatcatgatgtggctgtcaatgaaactataacccaggcgctttccataacgacgtcgtcagtccatgatcaaccagccccagctgatcctgataaactgcctgccacttatcgcgtgaatcctgataaagttcatgcttttccgggtctggtgtgtgcgtccgttcccagcgaaccaggcgttctccggtttctgccattgatgaaaaaattccggcaccgacgccagctgcaatggcacatcctaatgcagtggcttctttgaccaccggaatattgacgggtaatcccgagacatcagcgagaatttgactccataatttcccttttgaacctccgcctgcaaagactaacgatgaaggatgaatattcgagaaatcagcaatttgctgcaagttacacgctgatacaatcgccgcattttcttccagcgcacggaacaatgtcgctttgttacatttatccgggtcaatggacaagttaataaaggaaggcgcagcgtgataccaggttttaaagcgcattctgtcggagaagatcggcattacgccccacgacccaggcggcacccgactggccatctcttccagcagcgtataggtgtcgatgcctaaacgttcggcaatcagtttttcttcggcacagaaagcatcgcggaaccagcgcatggtgagtccggtaaaaaagcttatagattcagcttgtaccatgccaggaataacatgaggattaacgcgcacgttcatttctgggtctgtcaccggcgcggctaaatttacaacttgctgccagaatgtgccgccaagaaccgcggtttgtgccggacgcacaacgcctaacccaaggcaaccaagctgcacgtcgcctcctccaacgaccaccggagtgcccgccttcagaccgcagagttccgccgcttgtgaacttaccacgcccagcaatgtgccggtttctttgacaggagaaagaatatcggcacgtaggccagccatatccagcaatgcaggtttccagtcacgggtggttagatcaagaagtcccgtggtgccagcgttagagggatccaccgccagttcgccgctgagcatataggccagccagtcgctgatcatggtgatggttgatgcctgacggtaaatatcggaacgatggtgcgccagccaaagtaatctggggatggcacttaaagccagtgtttgtccggtcgcgcgataaacttcgttttcaaaggtattgttgtgcagttctttaagttcgctaacttcgcgtgccgctctggcatccacattggcgcaggcccagatcggggctccttcattattatataaaacaatgccttcacgcatcgaacatgccgaaacggcagcgatatactccggggctatgccggcgttgtgcagcgcctggcgcatacactcacacgccagttgccagtttttgttgagatcaaattccatagaaccaggaacgtccggtactgccagatgccgccactccgcctgtcccactgctatttgattgccttccaggtcgaatatcacagcccgaatacttccggtgcctgcatccagcgccatcaggtagtactttgattctgaaagggtaaagagtcgagccattagattatcctcggcttatgcgttctgtctgttcctctatacgttctccatcattcccggtaataaggtcatgcaaatttaactacgtaaaatcgccgctgctgtgtcctgatcggtaaccagtgcgttgatataaccgcctttcattgcagcggcaattgcttcggctttattttctccccctgccacgccaacccggacgggtatggtcttcagcgcgcttaaaggtaagccaatcagttcgttatgtattttgatattcgtgacaacgtcaccttttgcatcaaaaaagtagcctaaaatgtcgccaaccgccccttttcggccaatcattaactgttcgccctggctgatataaccggagcgaatgattgtcgcatcgtcctgttgactcacagcaccaatgccgacaatcgccacatccgctgcttgcgcggctaacagaacatctttgacgcaattttcattttttagcgtacgggcaatgtcagcggaggatgcccgcaacggagccggaataatattcacactgcacgccgcgttaagctgcccgattcccgtcatataagaaccgacgccaccggagagcgtgaccaggcgaatttgctgtgacgaaataaaaccacttaagcgttgcagcgtattcatggttgcctcgccaaaaccaatcgccagcatctgttgtggttgaagtaaactcatcaacatatgcgccgcgcctatccccagtcgcccaccgacatcagcatccgcaagcccagggatcacccggacatgttgcagcgaaaactgacgacgtaattgagtttcatattccagacagccttcaaagcgagaattaatctgtacgcgaataatgccggactgatgccctttctccagcaatcgcgacactttcaaacgtgtcaggccgagacgatcgctgatctcgctctgggtcagcccgtcgtgatagtaaaaccacgcgatccgcgcgacctgttcttcttcacacattccctgttctgaaattgccgaatcgttgattgtcataattcattcttcactttgaacatatttaaatctttaatgcaattgttcagttcttgctcatttatatctgtgatggcaaccacagtttgactctacgagcatgaacaaacgcaaccgtgaaaatcaaaatagcataaattgtgatctattcgtcggaaatatgtgcaatgtccacctaaggttatgaacaaattaaaagcagaaatacatttgttcaaaactcacctgcaaaactgaacgggggaaatatgcaaacgagtgatacccgcgcgttaccgctactttgcgcccgctcggtttataaacagtattcaggggtcaatgtcctgaaaggcatcgattttacgttgcatcagggggaggtccacgccctgctcggcggcaatggtgccggtaaatcgacgttaatgaagattattgccggtattacccctgctgatagcggtacgctggagattgagggcaacaactacgtcagattaacgccagttcatgctcatcagctgggtatttatctcgttccccaggaaccgctgcttttcccaagcctgtcgataaaagaaaacatcctgtttgggctggcaaaaaaacagctctccatgcagaaaatgaagaacttgctggcggcgctgggctgccagtttgatctgcatagtctggcaggatcgctggatgtcgccgatcgccaaatggtggaaatcctccgcgggctgatgcgcgactcgcggattctgatcctcgatgaacctaccgcctcgcttacccctgcggaaaccgaacgcttgtttagtcgcttgcaagagctgcttgctactggcgtgggtattgtttttatctcgcataagctgccggaaattcgccagattgccgatcgaattagcgtgatgcgcgacggaaccatcgccttaagcggcaaaaccagcgaactgtctaccgacgacattattcaggccatcaccccagcggtacgggaaaaatcgctctctgccagccaaaaattatggctggagttacctggtaaccgcccacaacatgccgccggaacgccggtgctgacactggaaaatctgaccggcgaaggtttcaggaatgtcagcctgacgctcaatgccggagaaattctgggcctggctgggctggtgggggccggacgcacagaactggccgagacgctctatggtctgcgtactttgcgtggcggacgcattatgctgaatggtaaagagatcaataaattatccactggagaacgtttactgcgcggtctggtttatctgccggaagatcgccagtcatccggactgaatctcgatgcttcgctggcctggaacgtctgcgcccttactcataaccttcgtggattctgggcgaaaaccgcgaaagataatgccaccctggaacgttatcgtcgggcgctgaatattaaattcaaccaaccggaacaagctgcacggacattatccggtggcaaccagcaaaaaatcctcattgccaaatgcttggaagcttcgccgcaagtattgattgtcgatgagccgacgcgcggcgtggatgtctcggcccgtaatgatatctaccagctgttgcgcagcatcgccgcacaaaatgtggctgtgctgcttatctcctccgacctggaagagatcgaactgatggcagatcgtgtgtatgtgatgcatcagggcgaaattacccactctgcactgaccgagcgcgatattaatgtcgagactattatgcgcgttgccttcggcgatagtcagcgtcaggaggcgtcatgctgaagtttattcagaacaaccgtgaaatcacggcactgctggcggtggtgctgctgtttgtattacccggttttctcgaccgccagtatttaagtgtgcaaacgctgaccatggtttatagcagcgcgcaaatcctgatcctgctggcaatgggcgcgacgctggtaatgcttacgcgcaatattgatgtttcagtgggttcgattaccggaatgtgcgcggtgctgttggggatgttactgaacgcaggatattcactacctgttgcttgtgtcgcgactttactgcttggtttgctcgcgggatttttcaacggtgtcctggtcgcgtggctaaagatccctgccattgttgccacccttggcacgttagggttgtacagaggcatcatgttgctgtggactggcggcaaatggattgaagggttacccgccgaactgaaacagctctccgccccgctgctgcttggcgtttcagcaattggttggttgacgataattctggtggcatttatggcctggctgctggcaaagacggcgtttggacgcagtttttatgccacgggcgataatttacagggcgctcgtcaactgggcgttcgtactgaagccattcgcattgtggcattttcgttgaacggctgcatggcggcactggcgggaattgtgtttgcttcgcagattggttttatccccaaccagaccggtaccgggctggagatgaaagcaattgcagcctgcgtgctgggcggcattagtttgctcggtggttccggtgcgatcattggtgcggtactcggcgcatggttcctgacgcagatcgatagcgtactggtgctgttgcgcattccggcatggtggaatgattttatcgcgggtctggttctgctggcggtgctggtgtttgatggacgcctgcgttgtgcgctggaacgtaatctacggcggcaaaaatatgcccgctttatgacgccaccgccatccgttaaacccgcttcgtcaggtaaaaaacgggaggccgcataatgcgtattcgctacggttgggaactggctcttgccgcactgctcgttattgagattgtcgcatttggtgcaattaacccgcgaatgttagatctcaatatgttgctgttcagcaccagtgactttatctgcattggcattgtcgccctaccgctaacgatggtgattgtcagtggcgggatcgatatttcgtttggttcgaccatcggcctctgcgccattgcattgggcgtactgtttcaaagtggtgtgccgatgccgctggcgatactcctgaccttactgctcggcgcattgtgcgggctgatcaacgccggattaattatctataccaaagttaacccgctggtgattacgcttggcacgctgtatctgtttgccggaagcgctctgctgctttccggtatggccggagcgacggggtacgaaggtattggtggattcccgatggcgtttacagatttcgctaacctggatgtgctgggactccccgttccgctgattatcttcctgatatgtctcctcgttttctggctctggctgcataaaacccatgccggacgtaatgtgtttttgattgggcaaagcccgcgcgtggcgctttatagcgcgattccagttaaccgtaccttatgtgcgctctatgccatgacggggctggcgtctgcggtcgccgctgtgctgctggtatcgtattttggttcagcacgttccgatctcggtgcgtcgtttctgatgcccgccatcaccgccgtggtgcttggcggggccaatatttatggtggttccggttccattatcggcaccgccattgcggttttattagtgggatatttgcaacaaggtttgcaaatggcaggagtgccaaatcaggtgtccagcgccctttccggtgcgctacttatcgtcgttgtcgtaggtcgttccgttagcctgcatcgccagcaaattaaagagtggctggcgcgtcgggccaataacccattgccataaaggatatcttcatgacacttcatcgctttaagaaaatcgccttacttagcgctcttggcattgccgcaatctctatgaatgtgcaggccgcagagcgtattgcatttattcccaaactggttggcgtgggattttttaccagcggtggcaacggcgcacaacaagcgggtaaagagctgggcgttgatgtgacctacgacgggccgacagaacccagtgtttctggtcaggtacagttgattaataacttcgtcaatcaaggttataacgccattatcgtttctgcggtttcgcctgatggcttgtgtccggcactgaaacgcgccatgcaacgtggtgtgagagtgctgacctgggactctgatactaaaccggagtgccgctcttactacattaatcagggaacgcccgcccagttaggaggtatgttggtggatatggcggcgcgtcaggtgaataaagacaaagccaaagtcgcgtttttctactcaagccccaccgttacggaccaaaaccagtgggtgaaagaagcgaaagcgaaaatcgccaaagagcatccaggctgggaaattgtcactacgcagtttggctataacgatgccactaaatcgttacaaaccgcagaaggaatattaaaagcgtatagcgatctcgacgccattatcgcccccgatgccaacgccctgcccgctgccgcacaagccgcagaaaacttgaaaaatgacaaagtagcgattgtcggattcagtacgccaaatgtgatgcgcccgtatgtagagcgcggcacggtgaaagaatttggcctgtgggatgtggttcagcaaggcaaaatttcagtgtatgtcgcggatgcattattgaaaaaaggatcaatgaaaacgggcgacaagctggatatcaagggcgtaggtcaggttgaagtctcgccaaacagcgttcagggctatgactacgaagcggatggtaatggcatcgtactgttaccggagcgcgtgatattcaacaaagagaatatcggcaaatacgatttctgatgtgcattacttaaccggagtaagttatggcagatttagacgatattaaagatggtaaagattttcgtaccgatcaaccgcaaaaaaatatcccttttaccctgaaaggttgcggtgcgctggattggggaatgcagtcacgcttatcgcggatatttaatccgaaaacgggtaaaaccgtgatgctggcttttgaccatggttattttcagggaccgactaccggacttgaacgcattgatataaatatcgccccgctgtttgaacatgccgatgtattaatgtgtacgcgcggcattttgcgcagcgtagttccccctgcgaccaataggccggtggtactgcgggcgtcaggtgcgaactctattctggcggaattaagtaatgaagccgtggcgttatcgatggatgacgccgtgcgcctgaacagttgcgcggtggcggcgcaggtttatatcggcagcgaatatgaacatcagtcgatcaaaaatattattcagctggttgatgccggaatgaaagtgggaatgccgaccatggccgtgactggcgtgggcaaagatatggtgcgcgatcagcgttatttctcgctcgcgactcgaatcgccgctgaaatgggggcgcaaattatcaaaacctattatgtcgaaaaaggttttgaacggattgttgccggatgtccggtacccattgttattgctggcggtaaaaaattaccggagcgcgaggcgctggaaatgtgctggcaggctatcgatcagggcgcttctggtgtggatatggggcgtaatattttccagtctgaccatccggtggcgatgatgaaagccgtacaggcggtggttcaccataacgaaacggctgatcgggcatatgaactctatctgagtgaaaaacagtaactgcggatctaaggagaagaattatgcacgtcacactggttgaaattaacgttcatgaagacaaggttgacgagtttatcgaagtttttcgccagaaccacctgggctctgtacaggaagaaggcaatttgcgcttcgatgtcttacaggacccggaagtgaattcgcgcttttatatctacgaagcctataaagatgaagacgcagtggcgttccataaaaccacgccccactacaaaacctgtgtcgcgaaactggaatctttaatgaccgggccgcgtaaaaaacgtctgttcaatggtttgatgccgtgaggcgaatttatcaattttatctacaattggggtaacgcgctgacgggagtaaaaaaatgtctgactggaacccctctttatatctacacttttccgctgaacgatcgcgtccggcggtggagctgcttgccagagtgccgctggaaaatgtcgaatatgttgccgatcttggctgtggcccaggtaacagcaccgcccttctacaacaacgttggcctgcggccaggataacaggcatcgactcgtctccggcgatgattgctgaagcgcgcagtgctttgccagactgccagttcgtggaagcagacatccgcaactggcaaccggtacaggcactcgatctgatttttgctaatgcctcactgcaatggctgcccgaccactacgaattgtttcctcatctggtttctttacttaatccgcagggcgtgctggcagtacagatgccagataactggctggagccgacccatgtgctcatgcgcgaagttgcctgggaacaaaactacccggatcgcgggcgtgagccgttggctggcgttcatgcttactacgatattttgagcgaagccggatgtgaggtcgatatctggcgaaccacctactatcaccagatgccgtcacaccaggcgattatcgattgggtgactgccactggattacgtccgtggttacaggatctgaccgagagcgaacagcagctttttcttaagcgctaccatcagatgctggaagagcagtatccactgcaagagaacggacagatactgctggcatttccgcgtctgtttattgttgcccggcgtatggagtaaatatcacgtcagctggtaatgacgatcgggaagaatttttgctggaatttcggcttcatcgttcatctgtaacaggtcaatttcaatagcgttgcagatggcatccagtggtaaatcattgttttcagtaccgaacggatcttccagttcttccgccagacaatccagcgaaataaaagtgtaggaaatcagcacagagataaaaggcgtcatgtaatgcaggtccacgaccagcgcgaacggcagcatgatacaaaacagataaacggtacgatgcaaaatcagggtgtaggcaaagggaattggcgtataggcaatgcgctcgcatcctgccaggaccgctgaaatatcattaagccgatcgttgaggctaataaacaggatatctgaaagctgtccattgcggcgctgaaccgccaaccattctcccattattaacaagatacggttagctggagagttcgaagccagtacacgctgaagatcttcagtcttgagataatgagccagcacttccgcctgtggctgtttgcgtaatgtcatgcgtaaacagtgggcgaaagcgatttgcagccgggcaaactcccttacacttgccgaatccggcaatgtcgtttttacctcgcgcagtaacgaccgtgaggcaatcatcaactgcccccaaagttttcgcgcttcaacgtaacgggcgtacccggcattattacgaaaaccaagaaaaatggcgatggcgacaccgagaatgctgaacggtgcgagggtgaatttgatgcccagatgcgtgtaccagggcagcatgaaaataacagcgatagaaaagagaaaattgagtagtaagcgcgaggatatcttggataatactgagccgtgccagacaaaaatacggcgcagccagtgttgttgtggacgaacaatcatggttatcttcaggcgtggaaaagtcgccctattaaacgtgattacgatcacattctcaagacgctacttacaaattacctacaagcttacaacattagcaggcgctgcatgtggcacctgttaatgataaaggcatataggatgttgtaactaatatggtgaaataagaaacccggtcgaaaccgggttcagaagtaacggtgttattagcacaacggacgtacagcttcgcgcatccctttttcgagaatcgcatccaggtcattagcaacctgctcgaccagaccaggcacttgcgtcaggtcctgctcccagtggtctttttctgccaaaacaatcgctaccagttcctgggtgccgataacacggtcacgatgctggctccagagttgctgataacgttccagccagtgtgcatcgtcctgtaccggatatgtttcgccgttacgctcaccacgatagaacgcaatcaatgccgctaatgcgaaagtaaggcgcgccggaagtgtgccgtttgccttctgccctgccagcagctgtggcaggatgcgggtgcggaacttggtcataccgttgagcgcgatagacagcagctgatgcttaatgtacgggttacggaaacgcccggtgactgcactggcgaaagattccagttcatcacgaggcaaatccagtaccggaataatttcttcgtagatagctttttcaacgaatgcgcaaatttcagcatcgttcatcgcttcacctacggtatccagccctgcctggaacgccaccggcaccagcgcggtgtgcgcaccgttgaggattgccactttgcgttctttgtacggtttaatatcgtcaacaatcagcacgttgagcggatatttgtccagacgcagttcagtcgctaaggatttcggtccctgaatcacaaacaggtaaaagtgttcagcggtgtcgagaaaaccatcgtgataacccagttcttcttccagtttagccacttcatcgcgcggataaccggtaacgatacggtccaccagcgtagaacagaagctgttagcctgatccagccattgaataaatgcttctggcagtgcccactcttgcgcatagcgcagcaccagttcacgcaacgcgtcgccattgtagtcaatcaactcacacggaatgatgatccaacctttatccagcgcaccgttgaaatggctaaagcgttcgaacagcagacgggtcagttttgccggatagcttaccgctggcgcgtcatcgaatttatcgcccgcatggtagctgatacccgcttcggtggtgttagagaaaacaaagcgcatttccgggttgtgcgccagtttcaggaattcatcgtattcactgtagacgctgatttcacgattaaccgagcgaatcagacgcgcgtcgctgaccgcttcccccttctcattcaggccacggataatggtggtgtacagaccatcctgcgtgctcagtgacggcgggaatgaagtttcaatcggacgaacaacgaccacgccagaattcagatcggtgtgctcattcaggagatcgatttgccagtcaacaaaggcgcgcaggaagttaccttcaccaaactgaatgatacgttctggatactgtgcaccgggaaaatcgcgacgatttagtgttttcacaatgggttcccttctgattagtcatacaacctgtttgaattggtacgacaggttagcaaactttaatacgccgaacccctgttttgatcaactcctgatgattaatgagcagttttatgagaaaagtgtggcgcggatcatggtttaatcgaggaaaaacgccttttcctggatcataaagtggtagaacacattgcattcaaatcgcgcgtaatgaataaagatgtcagacaacttcctcaccgtaacgcatagtgctggtacggttgcgcccatctttcttcgagcgatacagacacgtatcggcttcgaccatcaatttattaaagtcatcggtcagcgttaggtacgatgcgcgaccactaccgacgccaatacttaccgtgagataaagcgttttttgttgccaggtgaatggttgcagttcaacgcctttacggattttttccgccattagcagaccatcgacaggattcaccgacggcactgcaacagcaaattcttcgccgcccattcgcgccaccagccccttatcaccgacaatcttctgaatatgccgggcaaacacgcttaacactttatcgccacattcatgtccatagttatcgttaatgcttttgaaatagtcgatatcaagcagcatgacagtcagatgttgtgtctgtttcagcgatggacttttcagcgcctcataaagaccggaccgtgagtaaacctgagtcagaaaatcaaagtcggctcgcagcgcaacttgcttcattagcgaattgatcgctgccacgctaaaagaaaccataattgggcatatcgccatcgtggcaataccgagacgtgcggagaacatttgcggaatggagaacggcgaaccgaccgagatatcaatcaccgaatttgccaccagtacgatttccaccgcaccggtgacaaaggtcaacagacatgttacctgcggcgtatagcgcactgcacaccagattaatgcaggcagcgggaacgccagactccccgctccgccaatgactaccgaggcaataaccgacacaataagcgcgatggcgggcatcatctgttctgctttaaagcgcggcagcactccaggaatagccaacgtcagcatacaaggcacgatcaacacgcccgttgagaattgctcactgaaccagtccgcaagcaaaggccagaaatccagactatcaatactgaccgaaccaagatagcatgttcgctgacagcggcggcaaataaaggtaccctgggaatgctattttgtcgttttccgcaattctcatggctgattcatctgtacaaccagccagtgatagattaccgccacgatataacgttgttgttcttcgcttaacgaaacaccctgcggaatgttatgccacttagccagacaaccgcgacagcaggtcgcggtggcgtgctgagcgataaacaccggatgcccgcgcatgggggtttgcttaccgtcattagccggtaatgccggagcaagacgtttagcgacaaaatccgccgcatgttgttcgatgactggcgcgcctttctccaggcaatactgacgctctttcatgcccagacgaaagcgagagcgaaattttgaacgggataaacgcgcgaagagtggatcgagagactgcattaataaaccgaacgccctaactgtttcgtcaattgttcaagaacggcaatacccgcaagcgagttacctgcatcatccagttccggactccagacagcgatggccatttcatgcggaacaatcgccacaataccgccaccaacgccagatttcgccggtagccccacccgccaggcaaactcccccgcgttctggtacataccactggtcgccatcagcgcgttaatttgccgcgcctgcattggcgtcaccactggttcatcaatatgaatagctttcccctgattagccagaaagacaaacgtccgggccagctctacacagctcattttcagagcgcagtaatgaaagtagttttgcagaacggttgtcacgtcatgatggaaattgccaaacgacttcatcagccaggcgatagccgcatttcgcgcggaatgttcaaattcggaacgcgctaccaccgtatcgtaggaaatatcagacacaccgcttaagccgcgcacgacttccagcatacgttgccgtggtgcgcttaatcgcccttgcaacatatcgcagaccaccagcgcaccggcattaatgaacggattacgcggtataccctgctccatttccagttgcactaaggaattgaacggtgatccagacggatctttgccgacgcgttgccagatttcctcttcggagtaatgacgcatggcgacaacgagactcagcactttggaaatagactgaatggaaaaacgttcttgcgcgtctccggcctgaaaaagctgtccgtcaacggtacagatagcaatccccaatcgggaaccgtctactgtagccagcgccggaatataatccgcgactttaccctgaccaatgagcggccgcacttgccgcaagatgttttctaaaattgcattatccatggcgactgccactttctactcctggaccgcaggtctgaaaagacctgcgagtatatcagagctgaatatgtcgcgtcagatccggtctttccacaccgtctggatattacagaattcgtgtaagccgaaatgggaaagctcacgaccaaagccactctttttcacgccaccaaaggccactcgcgcgtcgctggcacaataaccattgataaacaccccaccgcattccagacgtgccgccatctgtctggcctgtgtttcgtcagtggtaaaaatggtcgctgaaaggccgaactcactatcattagccagttccagtgcatgttctgcatctttcgcaatggtgattgccgcaacggggccaaacatttcttcccgaaacgcggtcatttctggggtaacattcgccagaaccgttggcggatagtagttacctgccccagccatcttttccccgcccagtaacaaacgcgcaccctgcgccagggttttctccacctgatgatgcagctcatcacgtaaatcaaaacgagccattggtccgagagcgttctcttcgtcacggggatcgcccattttcaaggctgccgcagctgccacaaaacgttcggtaaatgccgaagcaattccctcttcgataataaagcgttttgccgctgcacatacctgtccggtattctgataacgtccggctaccgccgctttcaccgccagttccagatcggcatcgttaagcacaataaacggatccgaaccgcccagttccagtacgcattttttcagtgccgctccagcctgtgcgccaatagccgctcccgcacgaacacttccggtcaccgtgacagcagcaatgcgcgagtctttaatcatctgactgacaccgtcgttgtcggcattcagccagccatatacgccttgtgggatacccgcatctttaaacacctgggcaatgagctgtgcacagcccatcacattcggcgcatgtttaagtaagtagccgttacctgcaagaatgatgggaacagcgccacgcatcacctgccataacggaaaattccacggcataatcgccagaatcgtccccaacggtcgatactcaataaccgcctgctgattttccaccagcgtaggttccgccttcagcattgccggaccatgttctgcataccagtcacacaaattcgccgatttcgccacttcagcgcgcgcctggttgattggtttgcccatttcgcgggtgatcatttgcgccatttcttcgctacgagcgcgcagagccttaccgatatcacgcagtttttcagcacgataatctatatttgtctcgcgccagtcgcgaaagcctgctgccgccagctgaagtgcgttttcgatatcgtcagcgccagcccacggcagcacagaaagttgttcacccgtggcaggatttatcgaaattgcatgagttgccggagtaatggtcatcggggtatctcctttatgagtcatggtatgaagatacgcagatttactcttgctttaaaatgaataatattaagccacttattcacgaatcgagaatgctatggatctgacccaactggagatgttcaacgcggttgccgaagctggcagcataacccaggctgcagcaaaagtgcatcgcgtgccgtcgaatctcactacccgtctgcgccagctggaaacagaactgggggttgatctgtttattcgcgagaatcagcgtttacgtctctctcctgccgggcataactttttacgctatagccaacaaattctcgcgttagtggatgaagcgcggagcgttgtcgctggcgatgagccgcaaggtttattttctcttggttcgctggaaagcaccgctgcagtgcgcattccagccacgctggcggaattcaaccgtcgttatcccaaaattcagttttcactttccaccggcccttccggcactatgctggatggtgtactggagggaaaactgaatgcggcgtttattgatggacccattaaccatactgccatcgacgggataccggtataccgcgaggaactgatgatcgtcacgccacaaggatatgcgccagtaacccgtgccagtcaggttaatggcagtaacatttatgccttccgcgccaattgttcgtatcgtcgccacttcgagagctggtttcatgctgacggtgccgctccgggaactatccatgagatggagtcttatcacggaatgttggcctgtgtgatcgcaggagcaggcattgcgcttattccgcgctctatgctggaaagtatgccggggcatcaccaggttgaagcgtggccgttagctgagcaatggcgttggttaacaacctggctggtctggcgtcgtggtgcgaaaacacgtccgctcgaggcatttattcaactgctggatgtgcctgactcggcaagacagggatatcaatgagctatttttgatagttcttgcggttaatatgctctatatagtgatgttccgatgacttatgactatatggggcaaatatggttacgccagtaagcatcagcaattacatatctcttcctgatgattttcccgtacgtaatattgcaccgcaggtaaaagaagttttaaaggattttattgatgcacttagtacaataatatgtaatgaagagtggcgcacgtctttaaacatcaactcagccacaaaaaagatatttaataaccttgacaacttatcatatattcagaggacttcttttcggggtaacgacacgctatacaatgaaaaggttcagtttaaactcacttatcccgccaggaatggaagacacaaagaaaatattgaatttcaggtagtaataaatttaagccctatttatttagataattttcgccatgatggagaaattaatattttttgcgctcccaacccaaagcctgtcactatggggcgcgtatttcagaccggcgtcgagcgtgtactctttctgtttctgaatgattttattgaacaatttccaatgatcaaccctggtgttcccatcaaaagagcgcatacaccacatattgaacccctgccttcggatcaccataccgctgcagattacttacgccagtttgatttgcttgtcctgaattttatctctcgcggtaattttgtcatactcccccgattatggaataactctgaggttcacagatggttcgtcaataaagatcctaacttgatcaccgccattctcgacataacggacagcgaattaaaagaggatttgttgcaaagcctgatggattcattaggttctaacaaacatgtactacccgaagtctgcatctgctttttatcccttttagcagaacaagaatctcctcattttcagaacttgtttttatttttcgccaatatgttattgcactatcaccaatttatgaatcccaatgaaagtgatttgaatgacgtgttgatgccagcatcattaagtgatgataaaattatcaaacatatggcgcgcaggaccctcaaactgtttgtaaaaaatgaaacaccgccaaaagttactcacgaagacctggtgaaaaacaggcctcgctcccctgtcagaccacctatacccgcaaccgccaaaacgccagacctccctgaacgtcattaaaccgtgatgttaccgactctctgacgcgtgaaagaatcagcgtcagagaaacggaaaacgcgatccagatcacaaatgcattgtattcacatcattaaccgttttaagatcatttcatcactttttcgcaactcacccgataatctgttatgacaacaaacactgtttcccgcaaagtggcgtggctacgggtcgttacgctggcagtcgccgccttcatcttcaacaccaccgaatttgtccctgttggcctgctctctgacattgcgcaaagttttcacatgcaaaattaataataagctcaggtcggcatcatgttgaccatttacgcatgggtagtagcgctaatgtcattgccttttatgttaatgaccagtcaggttgaacggcgcaaattactgatctgcctgtttgtggtgtttattgccagccacgtactgtcgtttttgtcgtggagctttaccgttctggtgatcagtcgcattggtgtggcttttgcacatgcgattttctggtcgattacggcgtctctggcgatccgtatggctccggccgggaagcgagcacaggcattgagtttaattgccaccggtacagcactggcgatggtcttaggtttacctctcgggcgcattgtgggccagtatttcggttggcgaatgaccttcttcgcgattggtattggggcgcttatcacccttttgtgcctgattaagttacttcccttactgcccagtgagcattccggttcactgaaaagcctcccgctattgttccgccgcccggcattgatgagcatttatttgttaactgtggtggttgtcaccgcccattacacggcatacagctatatcgagccttttgtacaaaacattgcgggattcagcgccaactttgccacggcattactgttattactcggtggtgcgggcattattggcagcgtgattttcggtaaactgggtaatcagtatgcgtctgcgttggtgagtacggcgattgcgctgttgctggtgtgcctggcattgctgttacctgcggcgaacagtgaaatacacctcggggtgctgagtattttctgggggatcgcgatgatgatcatcgggcttggtatgcaggttaaagtgctggcgctggcaccagatgctaccgacgtcgcgatggcgctattctccggcatatttaatattggaatcggggcgggtgcgttggtaggtaatcaggtgagtttgcactggtcaatgtcgatgattggttatgtgggcgcggtgcctgcttttgccgcgttaatttggtcaatcattatatttcgccgctggccagtgacactcgaagaacagacgcaatagttgaaaggcccattcgggccttttttaatggtacgttttaatgatttccaggatgccgttaataataaactgcacacccatacataccagcaggaatcccatcagacgggagatcgcttcaatgccacccttgcccaccagccgcataattgcgccggagctgcgtaggcttccccacaaaataaccgccaccaggaaaaagatcagcggcggcgcaaccatcagtacccaatcagcgaaggttgaactctgacgcactgtggacgccgagctaataatcatcgctatggttcccggaccggcagtacttggcattgccagcggcacaaaggcaatattggcactgggttcatcttccagctcttccgacttgcttttcgcctccggtgaatcaatcgctttctgttgcggaaagagcatccgaaaaccgataaacgcgacgattaagccgcctgcaattcgcagaccgggaatcgaaatgccaaatgtatccatcaccagttgcccggcgtaatacgccaccatcatgatggcaaatacgtacaccgaggccatcaacgactgacgattacgttcggcactgttcatgttgcctgccaggccaagaaataacgcgacagttgttaatgggttagctaacggcagcaacaccaccagccccaggccaattgctttaaacaaatctaacattggtggttgttatcctgtgtatctgggttatcagcgaaaagtataaggggtaaacaaggataaagtgtcactctttagctagccttgcatcgcattgaacaaaacttgaaccgatttagcaaaacgtggcatcggtcaattcattcatttgacttatacttgcctgggcaatattatcccctgcaactaattacttgccagggcaactaatgtgaaaagtaccagcgatctgttcaatgaaattattccattgggtcgcttaatccatatggttaatcagaagaaagatcgcctgcttaacgagtatctgtctccgctggatattaccgcggcacagtttaaggtgctctgctctatccgctgcgcggcgtgtattactccggttgaactgaaaaaggtattgtcggtcgacctgggagcactgacccgtatgctggatcgcctggtctgtaaaggctgggtggaaaggttgccgaacccgaatgacaagcgcggcgtactggtaaaacttaccaccggcggcgcggcaatatgtgaacaatgccatcaattagttggccaggacctgcaccaagaattaacaaaaaacctgacggcggacgaagtggcaacacttgagtatttgcttaagaaagtcctgccgtaaacaaaaaagaggtatgacgatgtccagacgcaatactgacgctattaccattcatagcattttggactggatcgaggacaacctggaatcgccactgtcactggagaaagtgtcagagcgttcgggttactccaaatggcacctgcaacggatgtttaaaaaagaaaccggtcattcattaggccaatacatccgcagccgtaagatgacggaaatcgcgcaaaagctgaaggaaagtaacgagccgatactctatctggcagaacgatatggcttcgagtcgcaacaaactctgacccgaaccttcaaaaattactttgatgttccgccgcataaataccggatgaccaatatgcagggcgaatcgcgctttttacatccattaaatcattacaacagctagttgaaaacgtgacaacgtcactgaggcaatcatgaaaccactttcatccgcaatagcagctgcgcttattctcttttccgcgcagggcgttgcggaacaaaccacgcagccagttgttacttcttgtgccaatgtcgtggttgttcccccatcgcaggaacacccaccgtttgatttaaatcacatgggtactggcagtgataagtcggatgcgctcggcgtgccctattataatcaacacgctatgtagtttgttctggccccgacatctcggggcttattaacttcccacctttaccgctttacgccaccgcaagccaaatacattgatatacagcccggtcataatgagcaccgcacctaaaaattgcagacccgttaagcgttcatccaacaatagtgccgcacttgccagtcctactacgggcaccagtaacgataacggtgcaacccgccaggtttcatagcgtcccagtaacgtcccccagatcccataaccaacaattgtcgccacaaacgccagatacatcagagacaagatggtggtcatatcgatagtaaccagactgtgaatcatggttgcggaaccatcgagaatcagcgaggcaacaaagaagggaatgattgggattaaagcgctccagattaccagcgacatcaccgccggacgcgttgagtgcgacatgatctttttattgaagatgttgccacacgcccaactaaatgctgccgccagggtcaacataaagccgagcatcgccacatgctgaccgttcagactatcttcgattaacaccagtacgccaaaaatcgctaaggcgatccccgccaattgtttgccatgcagtcgctccccgaaagtaaacgcgccaagcatgatagtaaaaaacgcctgtgcctgtaacaccagcgaagccagtccagcaggcataccgaagttaatggcacaaaaaagaaaagcaaactgcgcaaaactgatggttaatccataccccagcagcaaattcagtggtactttcggtcgtgcgacaaaaaagatagccggaaaagcgaccagcataaagcgcaaaccggccagcatcagcggtggcatgttatgaagccccactttgatgaccacaaaatttagcccccatacgaccactaccagtagcgccaacaccccatcttttcgcgacattctaccgcctctgaatttcatcttttgtaagcaatcaacttagctgaatttacttttctttaacagttgattcgttagtcgccggttacgacggcattaatgcgcaaataagtcgctatacttcggatttttgccatgctatttctttacatctctaaaacaaaacataacgaaacgcactgccggacagacaaatgaacttatccctacgacgctctaccagcgcccttcttaattaataataatcgtcgttgttattaaccatcggacgcggcgctacgctgccatttatgaccatttacttgagtcgccagtacagcctgagtgtcgatctaatcggttatgcgatgacaattgcgctcactattggcgtcgtttttagcctcggttttggtatcctggcggataagttcgacaagaaacgctatatgttactggcaattaccgccttcgccagcggttttattgccattactttagtgaataacgtgacgctggttgtgctcttttttgccctcattaactgcgcctattctgtttttgctaccgtgctgaaagcctggtttgccgacaatctttcgtccaccagcaaaacgaaaatcttctcaatcaactacaccatgctaaacattggctggaccatcggtccgccgctcggcacgctgttggtaatgcagagcatcaatctgcccttctggctggcagctatctgttccgcgtttcccatgcttttcattcaaatttgggtaaagcgcagcgagaaaatcatcgccacggaaacaggcagtgtctggtcgccgaaagttttattacaagataaagcactgttgtggtttacctgctctggttttctggcttcttttgtaagcggcgcatttgcttcatgcatttcacaatatgtgatggtgattgctgatggggattttgccgaaaaggtggtcgcggttgttcttccggtgaatgctgccatggtggttacgttgcaatattccgtgggccgccgacttaacccggctaacatccgcgcgctgatgacagcaggcaccctctgtttcgtcatcggtctggtcggttttattttttccggcaacagcctgctattgtggggtatgtcagctgcggtatttactgtcggtgaaatcatttatgcgccgggcgagtatatgttgattgaccatattgcgccgccagaaatgaaagccagctatttttccgcccagtctttaggctggcttggtgccgcgattaacccattagtgagtggcgtagtgctaaccagcctgccgccttcctcgctgtttgtcatcttagcgttggtgatcattgctgcgtgggtgctgatgttaaaagggattcgagcaagaccgtgggggcagcccgcgctttgttgatttaagtcgaacacaataaagatttaattcagccttcgtttaggttacctctgctaatatctttctcattgagatgaaaattaaggtaagcgaggaaacacaccacaccataaacggaggcaaataatgctgggtaatatgaatgtttttatggccgtactgggaataattttattttctggttttctggccgcgtatttcagccacaaatgggatgactaatgaacggagataatccctcacctaaccggccccttgttacagttgtgtacaaggggcctgatttttatgacggcgaaaaaaaaccgccagtaaaccggcggtgaatgcttgcatggatagatttgtgttttgcttttacgctaacaggcattttcctgcactgataacgaatcgttgacacagtagcatcagttttctcaatgaatgttaaacggagcttaaactcggttaatcacattttgttcgtcaataaacatgcagcgatttcttccggtttgcttaccctcatacattgcccggtccgctcttccaatgaccacatccagaggctcttcaggaaatgcgcgactcacacctgctgtcacggtaatgttgatatgcccttcagaatgtgtgatggcatggttatcgactaactggcaaattctgacacctgcacgacatgcttcttcatcattagccgctttgacaataatgataaattcttcgcccccgtagcgataaaccgtttcgtaatcacgcgtccaactggctaagtaagttgccagggtgcgtaatactacatcgccgattaaatgcccgtaggtatcattaaccaatttaaatcggtcaatatccaacaacattaaataaagattcagaggctcagcgttgcgtaactgatgatcaaaggattcatcaagaacccgacgacccggcaatcccgtcaaaacatccatattgctacggatcgtcagcaaataaattttgtaatcggttaatgccgcagtaaaagaaagcaacccctcctgaaaggcgtcgaaatgcgcgtcctgccagtgattttcaacaatagccagcattaattcccgaccacagttatgcatatgttgatgggcagaatccattagccgaacgtaaggtaattcatcgttatcgagtggccccagatgatcaatccaccgaccaaactggcacagtccataagaatggttatccgttatttctggcttactggcatctctcgcgaccacgctgtgaaacatactcaccagccactggtagtgggcatcgatagccttattgagatttaacaagatggcatcaatttccgttgtcttcttgatcattgccactcctttttcacagttccttgtgcgcgctattctaacgagagaaaagcaaaattacgtcaatattttcatagaaatccgaagttatgagtcatctctgagataacattgtgatttaaaacaaaatcagcggataaaaaagtgtttaattctgtaaattacctctgcattatcgtaaataaaaggatgacaaatagcataacccaataccctaatggcccagtagttcaggccatcaggctaatttatttttatttctgcaaatgagtgacccgaacgacggccggcgcgcttttcttatccagactgccactaatgttgatcatctggtccggctgaacttctcgtccatcaaagacggccgcaggaataacgacattaatttcaccgctcttatcgcgaaaaacgtaacggtcctctcctttgtgagaaatcaaattaccgcgtagtgaaaccgaagcgccatcgtgcatggtttttgcgaaatcaacggtcattttttttgcatcatcggttccgcgatagccatcttctattgcatgaggcggcggtggcgctgcatcctgttttaaaccgccctggtcatctgccaacgcataaggcatgacaagaaaacttgctaatacaatggcctgaaatttcatactaactccttaattgcgtttggtttgacttattaagtctggttgctatttttataattgccaaataagaatattgccaattgttataaggcatttaaaatcagccaactagctgtcaaatatacagagaatttaactcactaaagttaagaagattgaaaagtcttaaacatattttcagaataatcggatttatatgtttgaaaattattatattggacgagcatacagaaaaagcaaatcacctttacatataaaagcgtggacaaaaaacagtgaacattaatagagataaaattgtacaacttgtagataccgatactattgaaaacctgacatccgcgttgagtcaaagacttatcgcggatcaattacgcttaactaccgccgaatcatgcaccggcggtaagttggctagcgccctgtgtgcagctgaagatacacccaaattttacggtgcaggctttgttactttcaccgatcaggcaaagatgaaaatcctcagcgtaagccagcaatctcttgaacgatattctgcggtgagtgagaaagtggcagcagaaatggcaaccggtgccatagagcgtgcggatgctgatgtcagtattgccattaccggctacggcggaccggagggcggtgaagatggtacgccagcgggtaccgtctggtttgcgtggcatattaaaggccagaactacactgcggttatgcattttgctggcgactgcgaaacggtattagctttagcggtgaggtttgccctcgcccagctgctgcaattactgctataaccaggctggcctggcgatatctcaggccagccattggtggtgtttatatgttcaagccacgatgttgcagcatcggcataatcttaggtgccttaccgcgccattgtcgatacaggcgttccagatcttcgctgttacctctggaaaggatcgcctcgcgaaaacgcagcccattttcacgcgttaatccgccctgctcaacaaaccactgataaccatcatcggccaacatttgcgtccacagataagcgtaataacctgcagcatatccgccaccaaaaatatgggcgaaataactgctgcgatagcgtggcggtatagcaggaagatccatattttccgccaccagcgcccgcaattcaaaatcatcgacatcctgcattgcttcgttttcttccaggcaatgccagcgcatatcgagaagtgcggcgctaagcagttcgctcatctcataccctttgttgaacaggctggcattacgcattttctgttgcagttcgtcaggcattgctgccccgctctgataatgccgggcgtagcgagcgaatacctgcggatgcgttgcccagtgttcgttgatttgcgacggaaattcgacaaaatcacgcggcgtgttggtgccggaaagcgtggcataacgctggcgggcaaaaaggccgtgcagcgtatgaccaaattcatggaataaggttatgacatcatcccagagtaacaacgcaggctcaccggcagcgggtttctgataattgcagacgttataaattaccggatgtgttttattaagcgttgattgctcaacaaaattgcccatccatgcaccgccgctttttgaatcacgggcgaagaaatcaccgtaaaataacgccagccccacgccattatgatcaaaaatttcccacacacgaacgtcaggatggtagacaggaatatcaaaacgttcgacaaacttaataccgaagagctgattcgcggtccagaatacaccttcatttaacaccgtgtttaattcaaaatatggcttgagctgcgcctcatcaagatcaaatttctcccgccgtacctgttccgcataaaatgcccagtcccacggctgcgcgctaaacccgccctgctgcttatcgataaccgcctgtatggaggctaattcatcgctcgcacgttgacgcgccgctggaacaatttcccgcataaagttaagtgctgcttcaggtgtttttgccatctgatcggcgattttccatgcggcataatgaggaaaaccaagtagtgttgcctgttgtgcacggatctccaccagacgttgaatgatagcgcgggtatcattggcatcatttttttccgctcgcgtccagcccgcaataaacagtttttcacgcgtcgcacgatcgcgcatttcggcaagcgccggttgttgggtggtattcagcagcggaatcagccatttgttatccagacctttctcgcgagccgcctctgccgccagcgcaatctcttgctcactcattcctgccagctgcgcgatatcgttcacaaccagaccgccggatttatttgctgccagtaatcgctggttaaactggctggtcagggtcgcagcttctgtattcagtacttttaattttgctttatcagcttgcgcaagtttggctccggcaaggacaaaacgttgatgaatcacctccaccaggcggatggattcactatcaagccccagggattcacggcgctgccagacagcatctacccgcgcgaataattcaccgttcagatagatatcattagccagttccgccagttcagcggaaaactgctcgtcaagacgctgtaattcatcattggtatgcgccgcagtcatcgcaaaaaagacgctggtaacgcgggtaagtaattctccgctttgttccagtgccagaatagtattgttgaaatcaggcatttgcgggttaagcgcgatggcagcaatttctgcccgcttttgctgcattccctcatcgaatgccgggcgatagtgatgattggcaatttgatcaaaatggggagccagatacggcagtgtgctttgcacaaggaaaggattcattgttgtcattttcttctcctgaacgcgaggtgttccatagcgtaggcttactgataacggagtgcaatcttgcaatccagtattacccgctcttaagcatcccgtgctatgttattgacacacaaaagcgttgaggaacagtgagatgatcgttttagtaactggagcaacggcaggttttggtgaatgcattactcgtcgttttattcaacaagggcataaagttatcgccactggccgtcgccaggaacggttgcaggagttaaaagacgaactgggagataatctgtatatcgcccaactggacgttcgcaaccgcgccgctattgaagagatgctggcatcgcttcctgccgagtggtgcaatattgatatcctggtaaataatgccggcctggcgttgggcatggagcctgcgcataaagccagcgttgaagactgggaaacgatgattgataccaacaacaaaggcctggtatatatgacgcgcgccgtcttaccgggtatggttgaacgtaatcatggtcatattattaacattggctcaacggcaggtagctggccgtatgccggtggtaacgtttacggtgcgacgaaagcgtttgttcgtcagtttagcctgaatctgcgtacggatctgcatggtacggcggtgcgcgtcaccgacatcgaaccgggtctggtgggtggtaccgagttttccaatgtccgctttaaaggcgatgacggtaaagcagaaaaaacctatcaaaataccgttgcattgacgccagaagatgtcagcgaagccgtctggtgggtgtcaacgctgcctgctcacgtcaatatcaataccctggaaatgatgccggttacccaaagctatgccggactgaatgtccaccgtcagtaatttttatacccggcgtaactgccgggttattgcttgtcacaaaaaagtggtagactcatgcagttaactcactcacaagcaagaacgaatgaccgtcgaaacgcaacttaatcccacacagcctgtcaatcagcagatttatcgtattcttcgtcgcgacattgtccattgcctgattgctccaggcacaccgttgtcggaaaaagaagtttctgttcgtttcaatgtgtcacgccagccggttcgtgaagcctttattaaactggcggaaaacggcctgattcaaattcgtccgcaacgtggcagctacgtcaacaaaatttccatggcccaggtgcgcaacggcagttttatccgtcaggccattgagtgcgcggtggcgcgtcgggcggcgagcatgattaccgaaagccagtgctatcaactggaacaaaatcttcaccagcaacgcattgccattgagcgcaagcaactggatgatttttttgaacttgatgacaacttccatcaactcctgacgcagattgccgactgtcaactggcgtgggataccattgagaacctgaaagcgaccgttgatcgcgtgcgctatatgagtttcgaccacgtttctccaccagaaatgctgttacgccagcatcttgatattttctctgccctgcaaaaacgtgatggcgatgcggtagaacgtgcaatgacgcaacatttgcaggaaatcagcgaatccgtgcgccagatccgccaggaaaacagcgactggtttagcgaagagtaattcatttcctctcatcccatccggggtgagagtcttttcccccgccttatggctcatgcatgcatcaaaaaagatgtgagcttgatcaaaaacaaaaaatatttcactcgacaggagtatttatattgcgcccgttacgtgggcttcgactgtaaatcagaaaggagaaaacacctatgacgacctacgatcgtaaccgtaacgcaatcaccactggcagccgtgttatggttagcggcaccggtcacactggcaagatcctgtcgattgatactgaaggtctgaccgctgagcaaatccgccgcggaaaaaccgtagttgttgaaggttgtgaagagaaactggcaccactggacctgattcgtctcggcatgaactaagcgtgtgaatgccgccgatggcggcattgcttttttacttcacggaatattttgccacggtcgctttcgcgccatgcgctaataaagacaagtacgtttccgtcactcttgcagtaaacaaactattgtctggcaaatcatcaccaaagatcgccttaatcgccagcaatgactggacgcgcgctttcccttcggcactactttgtacagccttctgaataacaggtaacagtgggtcactgatttctatcggatttccctgttcatcaacaccaccgacataacgcatccaacccgcgacgcccagcgccagcagatcgaacttgctgtcatgcgccagatgccagcgaacagaatccaacatccgctgtggcaatttctggctaccatccatcgcaatctgccaggttcgatgacgtaacgccgggttgctatagcgtgcaattaatcggttagcgtaatcttgcaaatcaacgccctgcactttcaacgtcggcgcttgttcctgcaacatcaagccatacgccgcataacgataatgttcatcttccatacagtcattaatgtgctgatatcctgcaagataccccagatacgccaggaatgaatgactgccgttgagcatgcgcaacttcatctcttcataaggcagcacatcgctaaccagttcggctcccgctttttcccattccggacgtccggcaacaaagttatcttctattacccactggcggaaaggttcacaggcaacgcccgcaggatcgcgcacaccggtaagttgttcgattttcgccagcgtatcctctgtcactgcgggcacaatacggtccaccattgttgatgggaaagtcacgttatcttcgatccattgtgccagttttacatcaacggcttgtgcgtaggaagtgacaacgtcacgcataacatgaccgttttctggcatgttgtcacatgacatgacggtaaatgcgggaagtcctgccgctttacggcgagccagcgcctcaacaatcacccctgttgctgttttcggctggtggggattttgcacgtcggcagctaccatcgggtgatcgagcattaactgtccggtcgccggagagtggaaataccctttttcggtgattgtcagagagacaatcgcgatttgcggttcacacatcgctgccaacacggtttctaagccatctatctgtacgtgcaaggcttttttaacgacgccaacgacgcgagccgtccacacatcggccgacatttccgcaacggtataaagattatcttgctgttgtaaatcggcaatttgctgttcgccgccgattaagttgacctcataatatccccagtcactgaaatgttccgtagcaagaatatcggcatacacaccctgatgcgcacggtgaaatgcaccaaagcctaaatgaacaattcttggagccaggttattaagatcataaacagggagtgtcgcttttgctgataacaaattatttcccataacaattccttaaatataaatatggcaagctatatgttttgttatatgaataaaaatcccctctccggtaagagaagggattaagggtttacagacttctggaaggttgcgcagctcttacaacacgcggttgatcttccgcagcgtcttccagcgcacttaaatcacggtctttcacctctggcattttcagcgcagagattaaaccaatcactgaatatgccatgatcataatggcgatcggataccaggattccgtcatggtgcagaaaatacccgccaggataggaccaaaaccggaagcgataagaccaccaatttctttagaaatagccatccgggtaaagcggtttttacagccgaacatttctgccatggtaatgttttccagagcaaataatcccagcaccgcacagttatgaatcacaatcagtgcaaccataatggtgctcggggcatagcttttatctacaatgatagaaagcattggccatgccagcacaatcgcggaggtattcataataatatacgggatccggcgaccaattttatcggataaccaaccaaggaacggaatggtcataaagccgagaatcgaactgatcatcaatgcatctgttggaattgctttgttaaacaataacgtctgcactaaatagcctgcaaggaaagtctgaattaacccggagttacccgcctgaccaaaacgcagccctgttgccagccagaaggatttgctctggaacatgctaccagcaggtgcaggttttgctgtcggttggttactgtcgttaaccttctcaaagaccgggctttctttcagattcatacgcaaccagatagcaaagaccatcacgacaacactcgccaggaacggtatacgccatccccacgccagcagttcctctttactgagaatgaagaacataaaggcccagattgccgttgcgctcaaggttccgcagttagttcccatagccacaaatgaggagataattccgcgcttaccttttggcgcatattccgccagcatcgtaccggcaccggaaatttccgcacctgcacccaacccctgaataatacgcaacgtcaccagcaagatgggtgcaaaaacaccaatctgtgcataggtcggtaacacaccaattaaggtggtacagatccccatcatggtgatggtaataaagagcacttttttacgccctattctgtcgcccattttgccgaaaataaatgctccgacaatacgcgccacataacctgcaccgtaggttcccattgccagaattaacgccattgccgttgatgattcaggaaaaaatatttcatgaaacactaacgctgcgccgagcgaatataactggaaatccataattcacaggtgttttttcccatcctgtggtttccttggcgttttctaggttttttcagatagttgcatttttttaaaaagcatcctaagttcgatctcagtgtctatctggggcctatttctgtcccatatatgccccaaaaaaactccccaacagataagtagttttttcatggatttatgcgtaaaatcaagaacggctggaaatcattcaatactcacactatcgaaaaatttaccagccaatcgcagcacgttcttgcataaggtgtgtctgcggtttttcaactattcagatacatcactcccatcacattcattcctccgcatcaaaggcatataggctatatcaccttgatatttttctttttcagataaaaactgttatctatgtatacttttaaacccaatccgtgtagagtctctacataagatagtttgcagttgccgcttcagcttgcgccataaaccgcctgatttttgctgccacctgttagcattcctgtatacctgaaacgacaatgtttatctacgaactttaagaacacccaagataaaaattgtcaactatatcatatataacacattactaattcgaggctatatgaacagcatactgataatcacatctctccttatcatattcagcatttttagtcatgccctaataaaattagggattggcatatccaataacccagacaaaaccgatgtataagtcaacatatcctgaatcagacatacaatatcgcaatgaaaatcaataatattttaaggaatatcttcatgaaatcaaaagacaccctaaagtggttccctgcgcagcttcctgaagtaagaattatcctaggggatgctgtagtggaagtagcaaaacagggaagacctatcaataccagaacattgcttgattacattgaaggaaacataaagaaaaaatcatggctggataacaaagaattattacaaacagcgatatcagttcttaaagacaaccaaaatttaaatggtaaaatgtaatataataaacttacttttttatcatttttccactttaacaacattttgctccacttttccacgaccaaacaacttgaaatctggttaaaataacacgcaacactattcttcttccttgagtccgcccggaactcgaaaaacaaaccgagttaaagccatttttcacaaaatcgattttgggtctcaccaaaattacggggttgcatacgcattcgtttattttcgaacgtgtacatacaaatatgcacaaaaataatcataattattttctgagatgcattatgatatgaacaccaatttcgtatagagtctcactatgtctcaaatttttgcttactgtcggatatcaacgctggatcagaccaccgaaaatcaacgccgggaaatcgaaagtgcaggttttaaaatcaaacctcagcaaataatcgaagaacacattagcggctcagcagcaaccagtgagcgtcctggttttaaccggttgcttgctcgcctgaaatgtggtgatcaattgattgtgacaaaactggatcgccttggttgtaatgcaatggatatcaggaaaacagtggaacaactgaccgaaacaggtatcagagtgcattgcttagcattggggggcattgacctgaccagtccaacaggaaaaatgatgatgcaagtaatttcagcagtcgctgaatttgaacgagaccttttacttgaacgcactcattccgggatagtaagagcccgcggcgcagggaaacgttttggtcgaccacctgtgttaaatgaagaacagaaacaggcggtattcgaacgaattaagtcaggtgtaagtataagtgccattgcccgggaattcaaaacctcgcggcaaaccattttaagagccaaagcaaaacttcagacacctgacatataaaaaataatctcggtgtgagatgctttacgtcttccaagcccccttccttgccgtaaatggaaagatacatctaattatagaatttatatgttttaccctacggcagtgctggccattcaatatcctgtgcagttgacgtatcaacacggttcagcaatacccgatactttttccatgcttccagcaacgagatttcttcctccgttgcaatttccagatctgcagcatcctgaagcggcgcaatatgctcactggctacctgcatcaggttgttttttgtttcttccgcctcccggatccggaacagtttttctgcttccgtatccttcacccaggctgtgccgttccacttctgaaactccccttccggcgataaccaggtaacattttccggtaacggaccgagttcagaaataaataacgcgtcgccggaagccacgtcataaaccgttttaccccgatgatcttcaacgagatgccacgatgactcatcactgttgaaaacagccacgaagccagccggaatatctggcggtgcaatatcggtactgtttgctggcagacctgtatgaggcggaatatatgcatcaccttcaccaataaattcattagttccggccagcagattataaatttttatggtccgtggttgttcactcattctgaatgccattatgcaagcctcacaatatagttaaatgcgatgtttttgacggtgttttccgcgttaccagcagcgttaacggtgatggtgtgtccatgtgaaccaatcgcaacggagtgcgtatgagcaccaataccgacagtatgtgcatgcgcgcctgcgcttgcagcagtgccggacagcgagtgggtatgagcaccatctgatgatgtcttccctgcattacgagtctggccactaccgcttgttgtgctcataatccccgcgcttagatttgaaatcgcggtataaccattagggaaaatgctcgtgttcgtgccaccaaatgcaccggaactcttgtgttggtgcgcaccggcactatttgcggtcccgctaatactatgggtatgcgccccggtgttattcgtggatttggttccgtaatcaaacgacgatgtggtttccgtccccaaatccgtactggatgcgctggcgctgtgggtgtgcgatttaatgccgtcctgttcctgagataatacggcccgaccactggcgggcttgcccttaatcgtccagccacgcatatcagggatcacgcctgacggataagcaactgcaagtttcgggtatgcagatttgtcaaaagtctgcccctgcatcagggcataaccagacggaacggtatctgatggccacgggattggtgcaccgactggataaaactctgcaggaggatgagccgaggtgtaaagctgcgcccacggcgaccagtttgcgtcggtcgtatcccgtcgtgaacgaataaatgccggagcatgagcaccgcttgtaccactccagccgatgagtaactcaccttcgccaacggctgtcatccctttcaggtgaatgatatttccatacgctgttggatatccgttgttatacacctcgtataactcaagacctgctgccccctgcgtattgtctgtcagcgcggttatattcactcagcaaccccggtatcagttcatccagcgcggctgctttgttcatggctttgatgatatcccgtttcaggaaatcaacatgtcggttttccagttccggaaaacgccgctgcaccgacagggggatcccgtcgagaatactggcaatttcacctgcgatccgcgacagcacgaaagtacagaatgcggtttccaccacttcagcggagtctctggcatttttcagctcctgtgcgtcggcctgcgcacgcgtaagtcgatggcgttcgtactcaatagtccctggctggagatctgtctcgctggcctgccgcagttcttcaacttcccggcgcagcttttcgttctcaatttcagcatccctttcggcataccatcttataacggcggcagagtcataaagcacctcattacccttgccaccgcctcgcagaacgggcattccctgttcctgccagttctgaatggtacggatactcgcaccgaaaatgtcagccagctgctttttgttgacttccattgttcattccacggccaaaaacagagaaaggaaacgacagaggcccaaaagctcgttttcagcacctgtcgtttcctttcttttcagggggtattttaaataaaaacattaagttacgacgaagaagaacggaaatgccttaaaccggaaaattttcataaatagcgaaaacccgcgaggtcgccgccccgtaacctgtcggatcaccggaaaggacccgtaaagtgataatgattatcatctacatatcacaacgtgcgtggaggccatcaaaccacgtcaaataatcaattatgacgcaggtatcgtattaattgatctgcatcaacttaacgtaaaaacaacttcagacaatacaaatcagcgacactgaatacggggcaacctcatgtcaacgaagaacagaacccgcagaacaacaacccgcaacatccgctttcctaaccaaatgattgaacaaattaacatcgctcttgagcaaaaagggtccgggaatttctcagcctgggtcattgaagcctgccgccggagactgtgctcagaaaaaagagtttcttctgaagcaaacaaagaaaagagtgacattactgaattgctcagaaaacaggtcagaccagattgaagcaatttagataatcgtgcagactacgccccctcatatcacatggaaggtttatctatggatcaggtagtcatttttaaacaaatatttgataaagttcgaaacgatttaaactatcaatggttttattctgagctaaaacgtcacaatgtctcacattacatttactatttagccacagagaatgttcatattgtattaaaaaatgataatacagtgttattaaagggcctaaaaaacattgtgtctgtcaaattttcaaaggataggcatcttatagaaacgacctctaataagctgaaatccagagagatcacatttcaggaatacagaagaaaccttgctaaagcaggagtttttcggtgggttacaaatatccacgaacaaaaaagatattactatacctttgataattcattactatttactgaaagcatccagaaaactacacagatcttaccacgctaaaccataacgtccggcttctctcactcctgagccggactgcattggtttaataaaaaccatcaacaattgtgatttagatattcggaaccattcaaatataacaaaaccccgtaaaaacgaggtttatggataaattttattattgaatacatcagattaaattaatcttgacatcatagctttcaagacccgtcattttttcccgtgcggtaaactgaatactggtaacttctttcccggtctttttcttaagttcaataattttttttgttatatattcagaaatatctgcttctgcttttgtttttaagttttcaatattcatcatttcctcttttagtctgttatgactttccagttacacagtaagtcgattatatggtgcaaacgtgtaaaagataagatgaaacatcgcaataatcaacatacgatagtctaaattttacacaaacagacaaagagaattttcctgaattatcaatgcaatagcatcaaatcaactcaagagccttattgctgcttccagaatttcttctgaagtaacatgtcgatccgcggctacataaatgactttatgatctccggtcagagatggaaaccctgcggccattacagtaaggtgtgttttttcgccatttggatattcacgcatgatggtgttaactccagtcatcgctggcactaccactgctggttcagagttaaaaaaactatgatttttttcatgatgttaccgtagtatgtgagtatccatcgaatagacaccaagcaaaaaagctcccgaaggagccttcattttcacttttttaaatccaacgacagacggctggcatttaagtattgtgaaatattatcaaatgtaatcatcattgatttacaaaagatacattttgccccgaaaggattcatgtcagaaacatcaaaagatgatgttctatactgggaaccatgacaacacgggcatctaaagtgaatatggtttgtaatattgtctacctcaaagcgccactacatgaacagcggcaggacctttaggtccgttctcaataccaaattcaacttcctgattctcagttaatgttttgaaatcgttgctctgaattgctgagaaatggacaaacacatctttgctgccatctttcggcgtgatgaaaccaaaacctttttcagggttaaaccatttcactaaaccagtcattttgttagacataattattaccttttgaagaaattagcccttgggcagaatggtccgaaaaaaaatatcagagagaaaaaccaacaaggaaatctcaagaggtacaaataataaaattataacaatgactgcttcagataaatttgtaacaaaccagaacaccattaacgcatgattaaccacccatagcaaggattacttttgtaaagaaaaacacagcaatgaaagaatagctttatttattaataaaacgtgtcattctgattaagaccttttatcttacccttaagatttcaggaattttggctcatggaagagtcctttttatttaaattttacattccgcgatgtaaatgttccgatttaatattaccctacatttgatgctttttatctcttaaagattcatagatctgttgacaagtcactcctgcgatgtagcgttcgtcagcaatttcagcataaagctgagcttctgctgcaatatctccgagcatgttggtgagcattccttcggcggttttggttgttttgcctctgacggcagcggcaagatctgcggtatgcttcgctgcgtcaaggcgtatggcatatttttttgcttcggcacgcaactggttaacactatcagacagataagcagccctggcagaaatttcagcagatttctgttgcgcatctttaacagcctcatcacgggctatagttcgcccctgttcaattattcgagcagcaaattgagcatttacctcttgtgataatgcggcagcatcacgttccgcccattttttttgccatcctcggtcgctccagacatttccgacgataaatcctgacaacacgagaaaaatcaccatgaatatctgattcactgttctatcccccagcaggttaatgcgctctcctggtcacgacgaataacctgaccgtaacagttatttgaacgaatgcggcaatcgcgtccgccatccttaatccaccagcgaatcgcttcgcatgcacctttacgatcaccagcattcagccgcttataaaacgtcgacgggaaacacttaccggggccaatgttatagggacaaaatgacgcgatacccgctttttgtggttcggtcagtggtactttaatattgcgctccacccatgccagcgccttatcacgctcaatggcgttgacctggtcgcatttttccttcgacagtttcatattgggaaaaacggtttttccatccaccactgtggcaccccgacagatggtccatatgccagaaccatcgcggtatgccattgtgtggttaccttctttttcgtccagaaactggtcaagtatctgaggagcagatgcgccagcaccaatcagcgccagaacggcagccgacaggccgtatctgatttttgtgttcatagatatttatgatgaggacgctcgtgcttattggcaggattttcaatcttaaaggagtactgatgctgcagataagactcaactttttctgacaatttttctgctacttccaggaagacttgccggacgctccttctggctgctgcctcataaaactccagcgcagctccttcaacacggtccatggcgacatccaggtcaaaaatttcaccgtcaaagcgttctttgtcctgtaaggctacagttaccgtaactttattctcaaaattacggactcctttcacaaccagttcatagtcttgagtcattggattactctcctctcgcagccttacgcctgtcttctttaatcttgaaataaagatttgtcagatacgtcagcaggccaaaaaccaggctacccagcacaccgattgcagcccactgtgacggagttactttatcgagtaactgcaatgcccagaaaccagcattacccgccgatgtgccataggcaacacctgttgttaacttatccattgatttcatatcctcaccccgatgtacacggatggtgcaatatgtttgaaaagatcggagtctacggggtagttttgacagcacacgttgttctcaacggcgctaaaaaaacatacacattaaaaatgtgggtaattattttgaaagaaagtcatatataaaataataatacgagaaatgttttcatatttagtgtactgtatacggccatttatacaggaaaagcctatgtcagaacgtaaaaactcaaaatcacgccgtaattatctcgttaaatgttcctgcccaaactgcacccaagagtcagaacacagtttttcaagagtacaaaaaggtgcccttttgatctgccctcattgcaacaaagtattccagacaaatcttaaagctgtagcctgattgattttattagtaacaagtattttttatattttaataatatatttaaagcagataataaaaaacccgcctgagcgggtttgagattgtggtgctttttgtgggagtcatccacttacgcactttgttttgccatgccagcagttagcttctgctgtaaaactattcatgcagcaaacctgcacttcaccacaatggttagcatacttttcctgattaagattttgccaaatatgctagccattgtttcatgtattggacctccttactttttattaaagagatccaatattcactactctgtccgtatctctactcaggcatcagccttcttcgttatcgtatacagacgagcgatgaattttaatcagtaatgatgacatttgctgctgcaggacctttagcaccactctctatagagaaggtaaccttttgaccttcaaataaggttcgataattatcattctgaatcgcagaaaaatgcacaaacacatctttactaccatcaacaggagaaataaagccgaaacctttatcagcgttaaaccattttactaaaccagtcattttatttgacattctacattccttaacttgagcctttcggcataaatggtttgcataacagaaacgacttcgtacttaattggagagactcaaagaaggaataagtgaataacacctgaaatgagaactgctttagtaaactacttcgtatatcgtctgttcttcaaaccgacgcaatcattaacgcatagttgaacatatgaagcaatgtttattttagacatccagccatcttcaaccccatcaaaaaactatagctttcttcaggaacgtgtgtatagtgcgccaagttatcagtattaaggaatttttttgtcccgtaaaatgacaggaattgtcaaaacctttgacggcaaaagcggcaagggtcttatcaccccatccgatggtcgtatcgatgtccagcttcatgtttcagcgctcaatctccgcgatgcagaagaaattaccaccggattacgcgtggaattttgccggataaatggtctgcgtggcccttcagctgccaatgtttacctttcatgagctatattaaagctttaatttcaggccccatcggatcacacatggagagtttttatgaataaccccgtctgtcttgatgactggttgattggctttaaaagcttatgctgtactttggccgtaatagctctgctaataatataataagcagactcattgtgtttagggacattgtactggaagaaaacattttaaacatcaggcaaataaccaagtcaccagctaaataataagttaacagacatgagtcccgggatgagattcaacattaccattgccccatttaaagcacaaaacccgctcatcagcgggttttctactttttcttaacgtcgggtatacaaagcccatcgttgaaaaaattttatccatattttttgaaaaatgcaaacatcatgtcgccatcttcagcaaaaatcatttatctcgtcaccttcctcaattgcgcttccgcgtatgcttcttcctgccagcactttgttaccagtttaccaatgacgtccgcataccccttataccactgataatcggtcaggtctggtaccagcttctggacatgacgtcgtgccagcgtggtcggtaaacgactaaaccggtttccattacaacgcccacaaatcttatataccggtacgccatgaaaccgggttcttttttcatccagaacaatccctttacccttacaccctctgcacgctgtgctggcttcgcccttaccatggcaatgctgacatagttccttcacccattcttccttgattacagattccccgcgtctgtagtgtttcaccacttcgcgcaatacattataaaatcccgtacctgaacaatgctcacagcgagccttacttgccgcagacctggagtaatcagcaaaggcaaaactcacgaggtaaggaataatctgtaaccggatttcttcactcaatttgttcaatgtcgggttatccagtgccatcgcgtaatttagcaggccttcaatcgcaaactgagggtcctgaacaccaacttttgccagaaataaggccaacccaagtggtgctttcgactgcaccatcccctgcgctgccattacatccgtaattgttaaacaaccggtgcctgtcgctggagcgtcatcgctcaattttggagattttggggagtaatattttggtaaggcttcaaggttcatgctcgttctccacttacgccagtacgccaattgccagcgcgcgatcgataaaacgaaatatcagctccagttgggagccatacttatcttcaaatgccactgtatccgtatgcagctcgttgtgatgctttctgcacaaaggcaacacaaagagatcatgtgcttttgttcccattccgccctgcccgtgaccaatcagatgatgcggatcgtcggctggcataccgcagcaagcacacggctgtgtcttaacccaacgtgtgtatttctccttaacccagcggcgacgtttaggcagcttcatgaaagattccggagactctggatcaacggtgatgcttaccaccgtcttttcctgtggtgatttttgttgctggtgggcgtaaggcaacggtgcaagattttttgtgcgttgtttcaatatgctggtggcggtcagctctcccggtacgatgtcgctttcgcggtacaccgagcagattttttccgctggtaatcccagcgaacgacgcgatacagcctcaggtagtgcatccaccacctgattgcagaccgcccaccaggataattcagccaaagataattcccgctcctgcgtaccgcttattgcgtgacggatgacgtcaatcacccatgctgtcagattttgttgagcaagcagctccagtgattccgatgtctggtcacgcagttggttgtcgcagtgccagcacaacaccattgcgccggtaccataacggtgaatgactgtttcagtgtgatggtaatcgccattaggccactggcaggatgtaacatgacgtaatagccagtcggacaatgcgccaacgccgccagcagcacgaatcacccgttcgttactaaaaaacggcagcaatgttttgtcttccgccagcggctggcgaacggcaggaacgactccggatggcagattacgcatgctttttggttccggttccaccagcactcgaggattatgaaatatctgtatggattcacggcccggcttaaggaccaccagcccaagctcaggcaccagaacaggtctaagtaatacccgcacgttacctccagatccgttgctggaaagtgcgggacgcacgtggtgggcgttcggaataaggcagcctgacagagattatccagtgccgatagtcgagactgagagctttcttaacctcgaacccgcgcctgcggtaagaatgaatcagccattcggcctgttctgcagtgcatggagggtgctggaaccattcagacttgaatgcgtgagaataccgcccgtgcgtgcaggcaagaacgggcgaattatcagaattgtaatattttgcgttgcgtgccatcggttttctccggtggcacggtgttactcagcgggagttcagccccgcgcaagattgtagatgagtttattctcctgaaaaagcagaaaagccagcttttattccgatctctttcaatgcctgtaatgaagtgacaaactcaccttcgcgcaagataaatccgtccgtgacccgagcatccacaaaattaattaacgcagccccattctttcgcaaacacataatgcggtaatgactaacaagatttccattttcaacgcacacagcatagaggccatcttcacaaaaaattttacgcagttcttcgatgttcatcatcagaatccttccggataattagctctcccctttaagggaccatccctcttatccctgcgcgctacttaagtatttttgattctattccggcaccgtccagaacttcaaacgcgttgaaaataaaaacaaaaacccgccgaagcgggttaagtgcgggtgcgttgaggatgcctgccacatcagaggtggcgagggatttctcccccgccgggtctcttactcctcaggttcgtaagctgtgaagacagcgacctccgtctggccggttcggattcgtacctcgcagaggtctttcctcgttaccagtgccgtcactatgacggttaaacagatgacgatcagggcgattaacatcgccttttgctgcttcatagcctgcttctcctgtcaacgcaaagcagaagtgtcaccttcggtgcgaaacagagatgtcatgctttggttcagagaatgcgtttgaccgcctcgctatatacttccgagcgttctcttttcccaacagaaatcacgaaaacgacaactttctcgtctataacctggtatacaaggcgatagcctgaagaccggagcttaatcttgtaacaatcaggcataccacggagcttgtttgcttcaatccggggtgactcaagtacttcaaccagcttctttttcaactgttcacgtaccgtcgagcccagctttcgccattcctttagtgcccgctcgtcaaaatccagaaaatacgccatcagagttcatccagcgtcacacgtactggcttaggattacgaagccgttctttcactatctccacaagttcagcatcttcatcactcaggagtgtctgtttgaacggcaagcgttcattgtcagcgatatactcgagcatgagacgaagcgcttcagaaggagttacacccattttttcaagcgcggcgtaagaacgcgctttaagttcatcgtcaatacgcaggttaatgctacccatgtcttacacctcttgtaattacaaatgtcattacaagtatcgcactacaacatgcttagggcaagtcacgaaggaagtcagaaagtagtcgtaagaacggtgatcactgtccgctttgtgccaggagcagccattgctaagtccatcctgtattgtgcaggtcagctcgtttttaaagagtccggccatcatcttactggtacagacaccatatactttgtgacggtcaggctacatatgcacaactcaacttattcatctattttttgctttagcatgtcagtgttgctttctcgtcggcgggtgagcggtgacctgacctgtcgataaaggaacgtaacacgttttatgcaacacccgcatgcggcagaaaattattgccgaacgtttacccctgtcaacaagctttactttctgaggcgcgccagcccgcgaggaaaacaatctgaacatcaaacaattaatgacacaagaaatacgattaaagatttttttgtgcatgccgatagtgcttttttaaaaggagaaatctatgtctgtcacaattcagggaaatacctcaaccgttatttcaaacaactccgccccggaaggaacatcagaaatagccaaaatcacaagacaaattcaggtgctgactgaaaagcttgggaaaatctcatcggaagaggggatgacgacacagcagaaaaaagaaatggctgcattggtacagaagcaaattgaaagcctctgggctcaactggagcagttgttaaggcagcaggcagagaaaaagaatgaagacgcgacagttcagcctgataaaaaagaagagaaaaaagacgatacaaataccgctggcaccattgatatttacgtctaagtgacagccgtattgtggccctcatcgggccacttttcgccatcagccttttctttaaagacatattatctttgtatcatttctgatagttaacattacaagatataagtaatggacgcactcccaattagtctatttaaatcgccacgagtttaactgacaacccatgatcaattatgaattgcaactatttctgtagtcacttttgtggggacagtccacaaaactgccaacttccgcttcttgctcttagcggacattagcataggctatttaccataacgcctcattacgcgcaccgcccagactgactcagcgcgtttctggcatatccccggtaaaacaagtaacaaaccacccgaaaatgaacaccagaaacgcgacttaagaatctaccctatgaatggatatgcactcaaccgaatcgatcttggtttcaatcttttttatcgggatcaggcttctttttaggtaacttcgggggcttaacttgctgatgactttgcgttcggcgcgtaagccagggatggtcagctttaggtttaacatagtattttgagcgtaaatcaatacgggcattatccactcgttcatggacactcttttcatcatccagtggtagcctccataattgcaggcactagcgccgtgaacttttcacgcttatccctggtgtcgatagccttccagcgttcaaatatcttcactcgattaacgccaagcgctcgctgatcaatcgcgccaccttcatatgtgacacgctgaacatcgatgttcgggcgctctttcaaagcccagaatgcttcagtgattaatatcgtcgcctgctcctgtgtcattcctggtcgacatatccaggcatccagagcctcacgagcctgttcaggagtgattttcattgttcaaccgccccgcccgcttcgtcttacgatattcatcataaactttgggatcatactgaagctccccgccagatgcctcctgtagacgcatcgcgcgaccttcgggaactaaatcccctttccagctataaagcgaagccaaacgaatacctgctgcttgtgcaagttttgtttttgaaccgaaatacaaaagagcgtcagttttaagcatttaaaacacctttattgttagtcataactaacaagatagatgttaacaaaaacatagtcaatacgatttagcattagctaactatggaaacaaaaaatttaactatcggcgaacgcatcaggtatcgtcggaaaaacctcaaacacacccaaaggtctcttgctaaagccctgaaaatctcccatgtgtctgtatcacaatgggaacggggtgatagtgaacctacagggaagaacctttttgccctcagtaaagtattgcaatgctcaccaacatggattctatttggcgatgaagacaagcaaccaacaccacctgttgagaagccagttgccttatcccccaaagaactagagctccttgagctgtttaatgcactgccagaatcagaacaggatacccagctcgccgaaatgcgagctcgagtaaaaaacttcaataaactctttgaagaattactaaaagcccgtcagcggacaaataaaagataacatcatcaatgagttatcttttaccacatcaattatgttagctatagcatacaaaatcacttgaccgatatgttagtcatggctaatcttgtttgcatcaacacaccgcacggtgttctcagcaaacagttccgctaccccagcgttaaggggaaatgaggtcagcatggatactatcgatcttggcaacaacgaatctctggtgtacggcgtgtttccaaaccaggacggcacgttcaccgcaatgacgtataccaaaagcaaaacgtttaaaaccgaaaatggtgcccgtcgctggctggaaagaaactcaggtgagtgatatggatttcgacacaatcatggaaaaggcttacgaagaatacttcgaaggccttgccgaaggcgaagaagctctcagcttcagtgagtttaaacaggcgctttccagttcggcaaaatctaacggctgataagcgaaacagcaccgcgaggaatcagtatgcagaaacgagaacccgtcatcatcgcgccagactataccgatgatgaactttatgagtggatgcgccagaaaattaatgcagcgcaggatctgaaatgggctaatgaagccagggctaagcaggctgaaaatctgtccgctctggagcaggatatcaccaatctggaaaaagcagcggcattaagcattgccagaatgattacatacccgcgttagtagctaatcaacaaagctaaggttagtaattaaggagttctccacgggtgaggtggagtgcgtgcgccggacacgggtgcgcatccggaactgacagtttactgaaaggatatttccctgaaaagtcagaccataacgcgaaagcgcatggcgaggtagctggttcatagatagcctgtcgttaaattttcgtcgaccgtgcgcttccggttgtggcaacccgcgaaatggcgcggcggtaagtatggcggggttattccttccccgttgaggacaccgggttgtcaggttgaccatacgcttaagtgacaaccccgctgcaacgccctctgttatcaattttctggtgacgtttggcggtatcagttttactccgtgactgctctgccgccctttttaaagtgaattttgtgatgtggtgaatgcggctgagcgcacgcggaacagttaaaaccaaaaacagtgttatgggtggattctctgtatccggcgttaattgttaactggttaacgtcacctggaggcaccaggcactgcatcacaaaattcattgttgaggacgcgataatgaaaacgttattaccaaacgttaatacgtctgaaggttgttttgaaattggtgtcactatcagtaacccagtatttactgaagatgccattaacaagagaaaacaagaacgggagctattaaataaaatatgcattgtttcaatgctggctcgtttacgtctgatgccaaaaggatgtgcacaatgaattcagcatttgtgcttgttctgacagtttttcttgtttccggagagccagttgatattgcagtcagtgttcacaggacaatgcaggagtgtatgactgcagcaaccgaacagaaaattcccggtaactgttacccggtcgataaagttattcaccaggataatatcgaaatcccggcaggtctttaaaacagttccgtaataaatatccggtttcattcttatatgccagcaatggcagggatttgttcatccttaaatctgtcatgaggttaaaacaaatgagtaaagtctttatttgcgccgctattcctgacgaactggcaacaagggaagaaggcgctgtggctgtagccacagccattgaagctggcgacgaacgccgtgctcgagcaaaatttcactggcaattcctggaacattatccggctgctcaggactgcgcttataaatttattgtctgcgaggataaacctggcataccccgccctgccctcgattcatgggatgctgaatatatgcaggaaaaccgctgggatgaggagtctgcttcttttgtcccggttgagactgaatccgatccgatgaacgtcacttttgacaagctggcccctgaagtacagaacgctgtcatggttaagttcgacacatgtgaaaacatcaccgttgatatggttattagcgcacaggaattgttgcaggaagacatggcaacattcgacggacatatcgttgaagcgttgatgaaaatgccagaagttaacgccatgtatccggagcttaagttgcacgccattgggtgggttaagcataaatgtattcctggtgctaaatggcccgaaattcaggcagagatgcgcatctggaaaaaacgtcgcgaaggtgaacgcaaggaaaccggaaaatacacgtctgttgttgatctcgcccgcgccagagccaatcaacagtacactgaaaattcaacaggaaaaatcagcccggtcattgctgccattcatcgcgaatacaagcagacatggaaaacactggatgacgaactggcctatgggcgctgcttcgcagacaggcagaacttgatggtatgcctgcgatcaatgccaaacgtgtttaccggatcatgcgccagaatgcgctgttgcttgagcgaaaacctgctgtaccgccatcgaaacgggcacatacaggcagagtggccgtgaaagaaagcaatcagcgatggtgctctgacgggttcgagttctgctgtgataacggagagagactgcgtgtcacgttcgcgctggactgctgtgatcgtgaggcactgcactgggcggtcactaccggcggcttcaacagtgaaacagtacaggacgtcatgctgggagcggtggaacgccgcttcggcaacgatcttccgtcgtctccagtggagtggctgacggataatggttcatgctaccgggctaatgaaacacgccagttcgcccggatgttgggacttgaaccgaagaacacggcggtgcggagtccggagagtaacggaatagcagagagcttcgtgaaaacgataaagcgtgactacatcagtatcatgcccaaaccagacgggttaacggcagcaaagaaccttgcagaggcgttcgagcattataacgaatggcatccgcatagtgcgctgggttatcgctcgccacgggaatatctgcggcagcgggcttgtaatgggttaagtgataacagatgtctggaaatataggggcaaatccacaggtgaactacgctcctctgtttgttacgcaataaaaactggtgttttcgactatgcaaaacagtttccctcctcacgcaatctggaaaaatttggtgaggcccgacaagatttaaccataaaagaactggctgaaaaatttctggcactgaaagaaactgaagtcgccaaaacatcactcaacacataccgtgccgtcatcaaaaatatcctgagcataatcggtgaaaaaaatcttgcctcatcgattaataaagaaaaattactggaggttcgtaaagagttactgactggataccagatccccaaaagtaactatattgttacacaaccagggagatcggctgtaactgtaaataattacatgacaaatcttaacgccgtgttccagtttggtgttgataacggttacctggcagataatccgtttaaggggatctcgccattaaaggaatcaagaaccattccggatcctctttcgcgggaagaatttatccgtcttatcgatgcgtgcagaaatcagcaagcaaaaaatttatggtgtgtttctgtttatactggagttcgccctggtgagctgtgtgcacttggatgggaggacatagatctgaaaaatggaacaatgatgatcaggagaaatttagcaaaagaccgtttcacggtaccaaaaacacaggcgggaaccaatcgggtcattcatcttattaagccagcaatcgacgctctccggagtcagatgacattaacgagactgagcaaagagcatatcattgatgttcacctcagagagtatggcagaacagaaaaacaaaaatgcacctttgtttttcaacctgaagtgtcagcgagagtaaaaaattatggtgaccattttaccgttgactcaataaggcagatgtgggacgcagcgataaaacgtgccggactccgccatcgaaaatcatatcagtcgagacatacttatgcctgctggtcgctgacagctggtgctaacccggcatttatagcaaaccagatgggccatgcagatgcgcaaatggtatttcaggtatacggaaaatggatgtctgaaaacaataatgcacaggtagctttgttaaatacacagttaagcgagtttgccccaaccatgccccataacgaagcaatgaaaaattaatttaatatttatcaaatagttaacacgcatgactcttgaaatccataaattcaagcgcagtgcccagccatcccgatactgctgctttcaccaaatccttagtgcttctttcgtgtttttctattgtcataatggttatctctaaaaaagaggtaagatgcgtactacttactcgccgttattggtattattcagaaaaagtgagtaagactttgcagcaatgtttttgatcctgttcaaataaactaatggcatcagcaacatgctggaaatcaaacgtatgggtaattaatttttctggtttaattaaccctttacttaaccagtcgataacgatcgggaatttatttgcatttaagcgtgaagagaaaatagagagttcttttccggtaattccttgctgaatcacttcagacggttcactggagaaccccatcaatacaatacgtgccgctggagaagccagcgttacggcctctttcaggatagaaggatgacaagccgcatcgataattaatgtcggcttgatgcctttttcagtgaaaatctcgccaagcggtgtctggctgttattaatcgcccagtcagccccgctctctttcgctttttccagtcgttcatcaatgcgatcggcaacaatcacatttttaacgttatagacgccttttaatacctgaacgatcgtcaggccgattggaccggcaccataaaccagaacggtatcattttcagtcggttgaccatgtccggttacgttagccgcaatggtaaaaggttcgatcattaccgcatattgatcggccactgcttcaggaattttccacgcattttttgccggaaccacggcatattcactgaaaccaccgtcagcgtgcacacctaatacagccagtgtcgtacaaacgttcggtttacctatagagcacggatagcaatgcccacagctgaccaccggatcgacagcaacacgttcaccgactctggcgctttccacgccttcacccactgcatcaatgacgccaaagaattcatgaccaatgacgcgcggatatttcgcaaaaggattatgcccacgataaatatggctatctgaaccacaaattccggcaagtttcacttttactcgtacttcacccgctgacggggtgggtatttcacgttcgacaatcgccagttgattcggtttttcaattaatatgcttttcattatcttactccttaccagttccacagcgtgccatcttccagacgtgcgactggtagataagcaggttcatagggatatttcgccgccagcttttcatcgaattcgataccaagacccggtttgtctcccggatgcatatagccgttatcgaaagtccagttgtgcgggaagacttcgagcatttgttcggaataacccatgtattcctggacaccgaaattggggacccacagatcaaagtgcagcgccgcagccatgcagactggtgacaaatcggaaggaccgtgtgagccagtacgtacctgatacagcgaagcaaaatcggcaatccggcgcataccggtaattccgcctgcatgggtcagcgtggtgcggatataatcgatgagttgctcttcaatcagttgtttgcagtcccagatgctgttgaagacttcacccactgcgatgggtgtgacggtatgttggcgaatgagacggaagcattcctggttttccgcaggcgtcgggtcttccatccagaacatgcgataatcttcaatgcttttaccaaagcgcgccgcttcaataggcgttaagcgatggtgcatgtcatgcagcaaatgttcattaaaaccaaacttgttacgtaccgcgtcaaacaatttcggcatgaaatcgaggtatttctccgtcgaccacagctgctcttccggccactgtcctttggttgcgggttcataagccagacctttacctttcgacatgccgtaggtggttttcataccagggattccgcactgcacgcggatggctttgaatccaagctcttgatgacgggcataatcatccagagcttcatcaatactgtgaccggtggtatggcaataaaccatcaccccttcacgagacgcgccgccgagtaactggtaaagcggcatgttggcagctttggctttaatatcccacagcgccatatcaaccgctgaaatggccgacatcgtaaccggaccgcgacgccagtaagcacctttatagaaaaactgccagatatcttcgatacggtgcgcatcgcgaccaataagctgcggacaaaggtgatcctgcaaataagaggccacggaaagctcacgtccattgagggtggcatccccaaggcccgtaataccgtcctcagtggtgatttttaatgtgacgaaattacgccccggacaggtaacaaaaacttcagcctttacgatcttcatgttcgattccttgcatcgcttgtcgtgatgcatgaaatctacgcaactgagctactaccatacaagtataaagatcgaaaaaagccggagtgatcacaaaaaaaggcgtatatttgcgctgtgaatggttgacaaaagatgaaatagaataccttttgtcagctgacacttcctcttatcttattgataaaatggatttatgttcctacgtgcgcccccagcccgcaacaatgatcaacatgccgcaaagcgcaatcaacgcacccgtccagtcataaagagtcagtttcacgccatccacaacgcgcagccacatcaacgccgtgcagacataaacgccaccataagccgcgtaaacacgcccactcgccgctggatgcaacgttaacaaccagacaaacagcgccagtgaaatccccgccggaagcaacagccagatactggcgtttcgttttaaccacaaccagggcagaaagcatccaataatttcacacagcgcagtagcaaaaaatagtaacgttgttttaatcatctttgtctcttattgacatcatgtatagttatagggcgacataatatcatcaatataaacaccctcctggtacgttttgcgtccgcagtggatggtgtagaatcacctttaatcattcatacagggaatgaattatgaaaatcactctcagcaaacgaatcggcctgctcgctattctgctgccttgcgcactggcattgagcacaactgttcatgccgaaactaacaaactggtgattgagtctggcgacagtgcacaaagccgccagcacgccgctatggaaaaagagcaatggaatgacacgcgcaatctgcgccagaaagtgaataaacgcactgaaaaagagtgggataaagccgacgccgcttttgataaccgcgataaatgtgagcaaagcgccaacatcaatgcctactgggagcccaatactttgcgctgcctggaccgtcgaactggccgcgttattaccccctaacctgttattgatttaaggaatgtaaggacacgttatgccaagcgcccacagtgttaagctacgcccgctggagcgtgaagatttacgctatgtacatcaactcgacaataacgccagtgtgatgcgttactggtttgaggaaccctacgaagcctttgttgaactctctgatctgtatgataagcatattcacgatcagagcgaacggcgctttgtggtggaatgtgacggcgaaaaagccggtctggtggagctggtggaaattaaccatgttcatcgccgcgcagaatttcagataattatctccccggagtatcaggggaaaggtctggcaacccgtgccgccaaattagcaatggactatggctttaccgttctcaatctctataagctgtatctgatcgttgataaagagaatgaaaaagcgattcacatttaccgcaagcttggcttttcggttgaaggtgaattgatgcacgagttctttattaatggtcaatatcgtaatgccattcgcatgtgtatattccagcatcagtatctggcagagcacaaaacaccgggtcagactctcctgaagccgaccgcacaatagcattaataataatcgatcgtatttttgatggtgtaaacccgttcgacggcgggttttactccttcatcaacaatgattagctgacagtccaccggattagcgtgactgtcatattcacagctctgttttacattaccaacccgttgattattcagtaaagtaaccgctgtgtaatctaattttttgatcggatccgttgatggcgtggcgctgacagataatgttttgtcgttacttttcgtggttttacccagcggataaccctgatcatcatagcgatattccatctgcatttgtttgctgctggctttaatcacgaagccattatcatcggtttcccaactcaccccggcagaaggtaattctgctagctggcattttccctgtaaacgtactctcttctccagcgtctcggcatcacggtaataattggcgtccagtaccagagcgaccacggtattattttccagatccagtaattcgagtgaatcaaaacagccttcttccgacaaagtcccagaaacacgtttcgtcacttcaccttgctcatccattaatgtctgagtgaaatcttttaccggaccacgcagcggatcaaaatcgaattcattagagaaactggccatctcaggggtaaatgaaagtgttacctctgtgcggtcacatcctgtgaggaatatcgcgagtaagcatggtagtaatttgtatttcacaacagtcaccagagagtagagatgattctcaatcatagtagcaaatacagtactttacacgttaaatgctatgcttaaagaagttatcttcgcgtaaggagcttatgatgaaactctcaacctgctgtgccgcgcttctgctcgccctcgcctcacccgcggtactcgccgcgccgggatcctgtgagcgcatacagagcgatatatcacagcgcattatcaataatggcgtacccgaaagcagcttcacgttaagtattgtacccaatgaccaggttgatcagcctgattcccaggtcgtcggccattgcgctaatgatacgcataaaattctctatacccgcaccaccagcggtaacgtctctgctcccgcgcagtctagccaggatggcgcgcctgccgaaccgcagtaacacattatcgactgaacgccggatatgacaaatccggcgatttgaacatacaacataatcccaccttattactcatacccttctattgatatggattaataattcttaacccaaaatgggtagactccctctattgttagcgcgctaaatattcaatatataaacttttatataacgataaagaacagggagtgagttatgtccaaaaatgaacgaatggtgggcatcagccgcagaacactcgttaaatctaccgcgataggttctctggcgctggctgcaggcggtttttctttgccgtttaccctgcgcaatgcagcagcagcggtacaacaggcccgcgaaaaagtggtctggggtgcctgttccgtcaactgtggtagccgctgtgcacttcgtctacatgttaaagataatgaagtgacctgggtggaaactgacaataccggcagcgatgagtacggcaaccatcaggtacgcgcctgtttgcgcggtcgctccatccgccggcgtattaatcatcccgatcgcttgaattacccaatgaaacgcgtgggcaaacgcggcgaaggcaaattcgaacggattagctgggatgaagccctggatactatcgccagtagcctgaagaaaaccgtcgaacaatatggcaatgaggctgtatatattcagtactcttcggggatcgttggcggcaatatgacccgctcttcgccatcagcctcggcggtcaaacgcctgatgaactgctacggcggttcactcaaccagtatggctcctacagcactgcgcaaatttcctgtgccatgccctacacctacggcagtaatgatggcaacagcaccacggatattgaaaacagcaagctggtcgtgatgtttggtaacaacccggcagaaacccgcatgagcggtggtggcatcacttatcttcttgaaaaagcgcgcgagaaatcgaacgccaaaatgattgttatcgatccgcgatataccgatacggctgccggtcgtgaagacgaatggctccctattcgcccgggcaccgatgccgcgctggttgcgggtattgcctgggtattgattaacgaaaatctcgttgatcaaccttttctcgataaatactgcgtcggctatgacgaaaaaaccttacccgcagatgcacccaaaaatggtcactataaagcctatattcttggtgaaggtgacgataaaacagcgaaaacgccgcagtgggcttcgcaaattaccggtatcccggaggaccgtatcatcaaactggcgcgtgaaattggcacagcaaaacccgcttatatctgccagggctgggggccacaacgccaggcaaacggcgaactgactgcacgcgctattgctatgttacctattttgacgggcaatgtcggcatcagcggcggaaatagtggcgcgcgtgaatcgacctataccattaccatagaacgcctgccggtgctggataatccggtcaaaacgtcaatctcctgcttcagctggacagatgctatcgatcatggtccgcaaatgacggcaatccgcgacggcgtccgcggcaaagataaactggatgtgcccattaagttcatctggaactacgcgggaaataccctcgttaatcagcattctgacatcaacaaaacgcatgaaattctgcaggacgaatcgaaatgcgaaatgattgtggtcatcgaaaactttatgacctcatcggcaaaatatgccgacattctgctgccagacctgatgaccgttgagcaggaagatattattcctaacgactacgccggtaacatgggatatctcattttcctccagcctgtcaccagcgaaaaattcgaacgcaaaccgatttactggatcctgagtgaagtcgcgaaacgtcttggacctgacgtctatcaaaagttcacagaaggtcgcacgcaggaacaatggttacaacatctgtacgccaaaatgcttgccaaagatccggcgttaccgtcttacgacgaactgaaaaaaatgggtatctataagcgtaaagatcccaatggccattttgtcgcctacaaagcatttcgtgacgaccccgaggcaaatccacttaaaacgccttccggtaagattgaaatttattccagcaggctggcggaaattgcccgtacctgggaactggaaaaagatgaagtgataagcccattgccagtttatgcctcaacctttgaaggctggaactcccctgaacgtagaaccttcccactgcaactgtttggtttccattacaaatcccgtactcactcgacctacggcaatattgatctcctgaaggctgcctgccgtcaggaggtgtggatcaaccctatagatgcgcagaaacgtgggattgccaacggcgatatggtgcgggtgtttaaccatcgtggcgaagttcggctaccagccaaagtaacaccacgtattctccctggagttagcgctatgggccagggagcctggcacgaggccaatatgtctggcgataaaatcgaccatggcggctgtgtgaatacgctaaccactctgcgcccttcaccactggcgaagggaaacccgcagcacactaatctggtcgagatcgaaaaaatataacccacgacaaccataaattctggcatgacattttgtttgaaaagcaataagtgagtaatgatgaaaatccataccacagaggcgctcatgaaggctgaaatcagccgtagaagtctgatgaaaacctccgcacttggcagtcttgcgctggcaagcagtgctttcactctgccattttcccaaatggtccgggcggcagaggctccggtagaagagaaagcggtctggagttcctgcaccgttaactgcgggagccgctgtctgttacgtttgcatgtgaaagatgacaccgtgtactgggtggagtctgatacgacaggtgacgacgtctacggtaatcatcaggttcgagcgtgtttacgcgggcgctctatccgccgacggatgaatcatcctgataggttgaaatatcccatgaagcgcgtcggcaagcgcggtgaaggtaaatttgaacggataagttgggacgaagccctggataccatcagtgataatcttcggcggatcctgaaagattacggcaatgaggctgtacatgtcctgtacggaacaggcgtagatggcggaaacatcaccaactcaaacgtcccgtaccgtctgatgaactcttgcggtggttttctcagtcgctatggcagctacagtaccgcacagatcagtgccgcaatgagttatatgttcggtgccaatgatggcaacagcccggatgatatcgccaatacgaaactggtcgttatgttcggaaataacccggcagaaacgcggatgagcggcggtggtgtcacttactacgtcgagcaagcccgcgaacgttcaaacgcacgcatgatcgtcatcgatccacgttataacgacactgctgccgggcgtgaagatgaatggctgcccattcgccctggcaccgatggcgcactggcctgtgcgattgcctgggtactgattactgaaaacatggtcgatcagccatttctcgacaaatattgtgttggttacgatgaaaaaacgctgcccgccaacgcaccacgtaacgcgcattataaagcctatattctgggcgaagggcctgacggcatagctaaaacgccggaatgggcagcaaaaatcaccagcatcccggcagaaaaaattatccagttggcacgagagatcggttcagcaaaacctgcttatatttgtcagggttgggggccacaacgacattccaacggcgagcaaacatcccgcgctattgccatgctttccgttctcaccggcaacgtcggcataaacggcggcaactcaggcgtacgcgaaggtagctgggatctgggggtagaatggttcccgatgctcgagaatcctgttaaaacgcagatttccgtctttacatggacagatgccatcgaccatggtacggaaatgaccgcgacccgtgatggtgttcgtggaaaagaaaaactggatgtccccatcaagtttttatggtgctacgccagtaacacattgatcaatcaacatggcgacatcaatcacacccatgaggtgcttcaggatgacagcaagtgcgagatgattgttggcattgaccacttcatgacggcctcggctaagtattgcgatatcctgttgcccgacctgatgccaacagagcaagaagaccttatctctcatgaatctgcagggaatatgggctatgtgatcctcgcccaacccgcaacctcagcaaaatttgaacgcaaacccatctactggatgctgagtgaagtcgccaaacgcttaggaccagacgtttatcaaacctttactgaaggtcgcagtcagcatgaatggatcaaatatctccatgcgaaaacgaaggaacgtaaccctgagatgcccgactacgaggagatgaaaacgaccgggatctttaagaaaaaatgcccggaagaacactacgtcgctttccgcgcattccgtgaagatccacaggcaaacccgttgaaaacaccttcggggaaaatcgaaatttattctgaacgactggcgaagattgcagatacctgggaattgaaaaaagatgaaattattcatccccttcctgcgtataccccaggttttgatggctgggacgatcccctgcggaaaacctatccactgcagttaacgggcttccattacaaagcgcgtacccactccagctacggcaatattgatgtgttacagcaggcctgcccacaagaggtgtggatcaaccccattgatgctcaggcacgcggtatccgtcatggcgataccgtgcgggtatttaacaataatggagaaatgctgattgccgcaaaagtgactccgcgtattctgcctggcgttaccgccatcgggcaaggtgcgtggcttaaagcggatatgtttggtgaccgggtcgatcacggcggcagtatcaatattctgacctctcaccgcccttcaccgctggcaaagggaaacccgtcgcacagcaatcttgtccagatcgaaaaggtttaaggagtagcccatgaccacacaatatggattttttatcgattccagccgctgtactggctgtaaaacctgcgaactggcgtgcaaagattttaaagatcttggcccggaagtcagtttccgccgtatttatgaatacgctggcggcgactggcaggaagataatggcgtctggcaccagaacgtgttcgcttattatctctccatctcctgtaaccattgcgatgaccccgcatgtacaaaagtctgccccagcggcgcaatgcataagcgtgaagatggctttgtggtggttgatgaagatgtttgtatcggctgccgctactgccacatggcttgtccgtacggcgcgccacagtacaatgctgaaaaagggcacatgacgaagtgcgatggttgttattcgcgcgtcgccgaggggaaacaacccatatgtgtcgaatcctgcccgctgcgtgcacttgagttcggtccaattgaagagctgcgccagaagcacggcactcttgctgccgtcgcgccactgccgcgcgcgcatttcacaaaacccaatatcgttatcaaacctaacgccaacagccgcccgaccggcgataccactggttatctggctaatccggaggaagtgtaaaatgggaaatggatggcatgagtggccactggttatctttaccgtattgggtcaatgcgtagtaggcgcgctgattgttagcggaattggctggttcgccgccaaaaatgacgcagaccgtcagcgtattgtccgtggcatgtttttcctctggctgttgatgggcgtcgggtttattgcctctgtcatgcacctgggatcgccactgcgggcgtttaactccctgaatcgaatcggagcttctggtctgagtaacgagattgctgccggttccatattttttgccgttggcggattatggtggctggtggcagtcatcggtaaaatgccgcaagcgttggggaaactctggttacttttcagcatggcgctcggcgtcattttcgtctggatgatgacctgcgtgtatcaaatcgacaccgtgccaacctggcataacggttacactacgctggctttcttcctgacggtattgttgagcggtccaatacttgctgccgcaattctgcgggcagctcgcgttacatttaataccacaccatttgccatcattagcgttctggcgctgatcgcttgtgccggggtgattgtgctgcaaggtttgtctctggcgtctattcactcatccgtgcaacaagccagcgcactggtaccagattacgcctccttacaggtctggcgtgtggtattgttatgcgcaggtcttggatgctggctttgcccgctcattcgtcgccgtgaacctcacgttgccggacttattctggggctaatcctcatacttggcggtgagatgatcgggcgtgtgctcttttatggcctgcacatgacagtaggaatggctattgcaggttaacaaattggtgcggggcaacccgcacatttcaggatgttaggaatgacccatttttcacagcaagataatttttctgtcgcggcgcgcgtgttgggcgcgctgttttattacgctccagagagtgcggaagccgcacctctggttgcggtactcaccagtgacggctgggaaactcagtggcctctaccagaagcgtcattagcgccgctggtgacggcttttcagacacagtgtgaagagactcacgcccaggcctggcagcgtttgtttgtcggcccgtgggcactgccgtctccgccgtgggggtcggtctggctggatcgcgaatctgtgctgtttggcgattcaacattggcacttcgtcagtggatgcgcgagaaaggcattcagtttgaaatgaagcaaaacgaaccggaagatcattttggttcactgctgttgatggctgcgtggttggcggagaatggtcgccagacagaatgcgaagaattgctggcatggcacctttttccgtggtcaacacgttttcttgatgtttttatcgaaaaagcagaacaccctttctaccgtgcactgggtgaactggctcgcttaacgctggcgcaatggcaatcacaactgttaattcctgtcgcggttaaaccgctgtttcgataggatcaccgtaatattgccggatggtgacgattacgcgcaatccggcaataataggttacagtgtcacgtttttttatctcttaaagcacgcactgcttttgcggctggcctcttttgccgcaaaatagtcgcccgtgtttcattgcccatttctgctcatgcatcatctacacatctatccggatctgcgcactatgttccaccgtctgcttatcgcaacagtcgtcggtattctcgcggcctttgccgttgccgggtttcgtcatgcgatgctgctactggagtggttgttcctcaataatgactccggcagtctggtcaatgcagcgacaaacctttccccctggcgacggttgctaactccggcgctcggcggactggcggcgggtttgttgctgatgggctggcagaaatttacccaacaacgccctcatgcgccgaccgattatatggaagcgttgcaaaccgatggacagttcgattacgcagcaagcctggttaaatcgcttgcctctctgctggtagtaaccagcggcagtgcaattggtcgcgaaggtgcgatgattcttttagctgcccttgccgcctcctgttttgcccaacgttttacgccacgccaggagtggaaattatggatcgcctgtggggccgcggcgggaatggctgcggcctatcgtgccccgcttgctggcagtttatttatagccgaagtgctgtttggcactatgatgttggcctctctcggcccggtgattatttccgccgtcgtggcattgctggttagcaatctgattaatcatagcgacgcgttactctacaacgtacaactctcagtgacggttcaggctcgtgactatgcgctgattatcagtacaggtgtgctggcaggtctgtgcggaccactgttgttaacgttaatgaacgcctgtcatcgtggatttgtgagtctcaaacttgcgccgccctggcaactggcactaggcgggttgatcgtgggtctgctttccctgttcacacctgcagtgtggggcaacggctatagcaccgtacaatcctttttaaccgccccaccactgttaatgatcattgccgggatcttcctttgtaaactgtgtgccgtgctggcgagtagcggttccggcgcacccggtggggtctttacaccgacgctatttatcggtcttgccattggcatgttgtatggtcgtagcctgggattatggttccctgatggcgaagaaattacacttttactcggattgaccgggatggcgacactgttggcggcgaccacgcacgcgccgattatgtcgacgttgatgatatgtgaaatgaccggggagtatcagctactccccggtttattgattgcctgcgtaattgcgtcggtaatttcgcggacgttacaccgtgactctatctaccgccagcacactgcgcagcatagctaagcggatgtattgccccagttcacgctgttcggcgcgcggcagataaggcagttcaccaatgagcggtgccggaagttttttacccagcacatcaatgatttccgcataatgcgccagtcctgggttgattcggttagccacccagccaatgagcggcagcccgtcgttggcgatcgcctgagctgttagcagtgcatggttaatgcaaccttcctgaataccgacaaccatcaacaccggcagttgttcctgcactacccattcagagagtggacgcaaatcattcatcagactgcgccagccgccagtcccttctaccacgacatgatcgactttttcggtcaggtttgccaggccgtttgaaatgagggtgtaattgattgggcaactgtgcgccacgctactttcttcttcgcttaacgcgataggattaactgcttcataaggcagttcgatggttgaaacactctgcaacaccagggcatctttattacgcagcccttcgggtgtctctttgctccccttcgctacgggtttatatcccgcaaccgtttttccctgggaggctaacgcttgtagcaatgcgcgggaaaccaccgttttccctacagaagtgtctgtaccggtaataaagaaacgcttcagcatcactaactccaccgttatgcttcacaaatataaaccaggaaaataattaaccttgaaagtctaagttatgctttcctggcccaaattgagatagcgcaaattttggtagaacagttaaaaaatgttaaccctgcaacagacgaatcaacaaagaaccgttatacatcgcgtcttttaccagtgcagcgcctgccatcgtgccctggttagaaaactgagtactctcaacgctgatgtgctgactatacgcaggaagggcctgctgacggatgctgtctgagatgaccgggaagaggatatctgccgctttacttaacggtgagccaatcagtattttttgtgggttaaataaattcaccatgatggcaagaatgcgcccgacatgcgcgcccaccccggtaatgatgtcttttgccagtagatcgccgcgcaatgccgcctgacacaatgagtccacggttaacggttgtccatgtaacatcgagctcatggattgattaagacgcagctgtgccagctcaagaatactgtccacgctggcgatggtttcgaggcagccgtgattcccgcaataacagcgtttcccatacgggtcgacctgtgtgtggcctatttccacgagactactgctgcctgcgtgtagcagatgaccatcggtaatgacgcccgcccccacgttgtgatcgataaccacctgaatcacatcgcgcgccccgcgtgaggcaccaaacaaggcctctgccatcgtccatgcgctgatatcatgctgaatataaaccggaacgccggtatgctgctccagcgcctcgccgagcggcatctcttttacatcctcgtagaacggcatgcgatgtacaataccattttccgtatcaataattcccggcaaggttatggcaatcgaagttagacgctcaagttttttctggtggcggataaaaaactgatcgatatgggaaataatacgatccagcaatggcaagtcatcttttaacgccagttcctgcgactcttccaccaccagtttgctgctcagatcgcgcagagcaaggaaaatctccccgcgactaatgcgcagagaaagatagtgccaggcttcagtttcaaccaccagccccaccgccggacggccacggttccccgcttctttgatttccagctcttgcaccaggtgtgcttcgagcatctcacggacaattttagtgatactggcaggagccagttgcgccagacgggaaagatcgatacgcgagactggaccaagctgatcaatcaggcgataaaccgcgcccgcgttggtctgctttatttgatcaatgtgcccaggctggttttcagcaaccaccgcatactccctatattttcgcgctccgaaataatctgtaggctatggtgaagcacttcaatacgtgtcgtcaaatttttacttaggcatgtgattaacagcacatttttcgggctttttcgctgaaatttccctcacctgagagcattcagcagatgaatacgaaagttacgcgcagccggactttgttcatgatgtttcggccagaccaaccacatttcagaaaccgcatcctcttcagcaatcggcacccagcgcatttcgttgagctgaacacgtttaaatgacgcaggcaaaattgaaacacccagaccggcggaaaccagaccgatgatggtcattgcctcgcccacctcctgagtgatgacgggcgtcaaatggtaacgtcgcatcagcccgagaatatcgtcatacagccctgtcccgacgtgcggatcaaaaaagacaaagggttctttcgccagttcagccagcgttacattcgggttatttgccaggggatgatcgtgcgggatcatcgccataagcggttcatggacgatgactgcgtgttcaagcgactccggtaacgctgtgttacgcagcaatcccatatccagcgttccttcaatgagcggagcgatttgctcgcgagtgttcatttcgcgggtttgtaaatggacatcaggataatcacggcgaaacagcgataacgtatcggacaccgcccgaataaaaggagccgacgaagtaaaaccaatgcgcaactcccccgcttcaccctgatgcagcctttcagcgcgagcggcagcgtcatccaccatagacaggatttgccgactatctgcaagaaactgttttcctgctgccgtcagcaatacactgcgattggttcgtgccagcagtcgggcaccaatttgttgctccagcgcctgaatctgctgacttagcggcggttgcgaaatattcaggcgggcagcggcgcgcccgaaatgcagctcttccgcaacagcaacaaagtaacgcagatgacgaagttcaatattcatatttaaaacatcttatttgagattattaatatattagacagaacaattcgattttcctaccctatgtataagcctgatctacaggcatatttagcaaggatttcaagtgagccgtactacaactgttgatggcgctccggcaagcgacactgacaagcaaagcatttctcagccaaattaatttattaaacgcggtacgccgcaatttatgcgcgtcaattaataataactggcgctgttctctgccggactggcaacatttgcacttctctattgtgtgcagcctatccttccggtgctttcgcaggagtttggcttaacccccgcgaacagtagtatttcactgtccatttccacggcgatgttggctattggtttgctgtttactggcccgctatccgatgccattggtcgcaaaccagtgatggtcacggcgctactgttggcctccatttgtacgttactttcgacaatgatgaccagctggcacggcattttgattatgcgcgccttgattgggctttcgttaagtggcgtggcagctgttggcatgacttatcttagcgaggaaatccatcccagtttcgtggccttttcaatggggttgtatatcagcggcaactcaattggcggcatgagcggacgcttaattagcggtgtcttcacggactttttcaactggcgaattgctctggcggcaatcggttgtttcgcgctggcctcggcgttgatgttctggaaaatcctccctgaatcacgccattttcgcccgacttcgctgcgccctaagacgttgtttatcaactttcgtctgcactggcgtgaccggggattaccgttattgttcgcagaaggctttttgctgatggggtcgttcgtcacgctgtttaattacatcggctatcggttgatgctctccccctggcatgtcagtcaggccgtggttggcttattatcgctggcttatttgaccggtacatggagctcacccaaagccggaaccatgaccacccgctatgggcgtggtccagtgatgttgttttcgacgggggttatgctgtttggtttactgatgaccttattcagctcgctgtggctgatctttgccggaatgttactcttctcagcaggattcttcgcagcccactcagtagccagcagctggatcggcccccgcgcaaaacgcgctaaaggccaggcctcctcgctgtatctgttcagttactatctggggtcgagtattgccgggacgctgggtggtgttttctggcataactatggctggaacggcgtcggcgcatttattgctctgatgctggtcattgctctgctggtcgggacgcgtttgcatcgtcgtctgcacgcctgaaaaataagtccggactgcggtaaatacccgtccggacttattgccagctcaaaccaacgttaatagccatcctaaaatagacgaagcgccagccaattcccgcagcgcgtctagcgtcatcaggattataagtacccaaataaacggattcattttgctgtgtgtcatttattactgatgcgcagttattctactgctttgtaagtagtaaaatagttaacccgatcaagactactattattggtagctaaatttcccttaagtcacaatacgttattatcaacgctgtaatttattcagcgtttgtacatatcgttacacgctgaaaccaaccactcacggaagtctgccattcccagggatatagttatttcaacggccccgcagtggggttaaatgaaaaaacaaattgagggtatgacaatgaaaaaagtattagctctggttgttgccgctgctatgggtctgtcttctgccgcctttgctgcagagactacgaccacacctgctccgactgcgacgaccaccaaagcagcgccggcgaaaactacacatcataaaaaacagcataaagcagcacctgcccagaaagcgcaggcggctaaaaagcatcataaaaatacgaaagctgaacagaaagcccctgaacaaaaagcgcaggcagcgaagaaacacgccaagaaacacagccatcagcaaccggcaaaacctgctgcacaacccgcagcgtaagttttcaacagtaatgctggcgcgccccctcgcgcctgaaaattacggtgctaagcgggtaacgtttagcaccgcctttagcggagggtagtatggtgggccgttatcgctttgagttcattctgatcatccttattttatgcgcactgattaccgcccgtttttatctttcctgattgtagttatctgattttactcccactttcatcccgtcccgtctatagtatttatgagggtttgcttttaataatcataattacccaccagagtgtgatatgcgtacaaccattgctgtagtgttgggtgcaattagtttgacgtctgcttttgtgtttgcagataaaccagacgttgccagatcggcaaacgatgaggtcagcaccctgttttttggtcatgatgatcgtgtgccagtgaatgacacgacccaatcaccgtgggatgcggttgggcaactggaaacggccagcggcaatttatgtacggcgacgctgattgcacccaatctggcattaacggcaggacactgtttattgacacctccaaagggtaaagccgataaagcagtggcgctgcgttttgtgtcaaataaaggtctttggcgctatgagatccacgacatagaaggccgcgttgatccgacactgggaaagcggttaaaagcagatggggatggttggattgtacctcccgcagccgcgccgtgggacttcggattgattgtgctacgtaatcccccttctggcattacgccgttgccgttatttgagggagataaagccgcgcttaccgccgcattaaaagcggcaggtcgtaaagtgactcaggcaggctaccctgaagatcatctcgatacgttgtacagtcatcaaaactgtgaagtgactggctgggcgcaaacgtcggtgatgtcacatcagtgcgataccttgccgggtgacagcggttcgcctctgatgttgcataccgatgacggctggcaattaattggggtgcaaagttcggctcctgccgcgaaagatcgctggcgcgccgataaccgggccatttctgttaccggttttcgcgacaagctggatcaactgtcgcaaaaataatgttcaaacgctgcccgacagcgcgggcagcgtcttcatcaggcaagtttcaccatgatcattccagccaacagcaagaccaggccaatccagcctttacgatttaaccgttgaccaaacaagatccaacctgcggctaacgtggcggcaataccaaacccgccccacaatgcataagcgacagacaagtcgatccctttaacggcttgagaaagcgcactaaaggcagccagcaccgccgccagggagagcaagccaaatattttgcgacgaaagccgtcagaaaatttcaaaaagacgttagcaacgatttccagcacgattgccaatgccagccaggcggcgtgaacccattcaaactgcgccatggttcacctccagttcaggtttacgcgctttacgggtacctgattttatcaacacaatcccggcgaccagggtggttaacccggcaattttcatcagcgataaactttcgtcgaataacaaaacgctaaacaaggtaataaataaaataccgataccttcccacagcgcataagctacgcctaaggcgatttttttaacggcgaaagagagaaatatatacgacagagaaatcatcaccagcattaaaataaattattattaattgccatttccctcactgacgctcgcccatttcattgacagcgtaccggtaatttctgtagcaatagccagacctaataaaatccaataaatatacattgtccttctcctgcaagagaattattttaattttcgcttaattcagcgaaaccaaagtaaagtggtcaagccccgcgcatagcgcaagctttggcagaagaaaggactaaagcgcgttgcgccagtgctgctcacctacgagcaagatagtggatgaggtacgaagatgggtaaatgtagaaaataacgtcctgaacaaattgtccataatattacaattatccgcagtgttgcttctcgtcatcgcggatgataattgtcctcggtagttgaacacgcctgatttgtatcatagcttaagaattaactcaaaatattttcacttctttacctgagcggtttgattttcgttatgatgacggagcgaaaaagacattattattagcaaaggaagaaaaaacggggacaagcatggcaaagccgatcatcacgctcaatggcctaaaaatcgtcattatgttgggaatgctggtcattattctctgcggtatccgttttgccgccgagatcatcgtgccgtttattctcgcattatttattgctgttattcttaacccgctggtgcaacacatggtccgctggcgtgtgccgcgtgtactggcggtgtcgattttgatgaccatcatcgtgatggcgatggtgttgctattagcttatctgggttccgcgctcaacgagttgacgcggacgttaccgcaatatcgcaactctattatgacgccgctgcaagcgcttgaaccgttgttgcaacgcgtagggattgacgtctcagttgaccagctggcgcattatattgatccgaacgcggcgatgacgttgctcaccaacttattgacgcagttatctaatgccatgtcatcaatatttttattgctgctgacggtgctgtttatgctgctcgaagtgccacaattgcccggaaaatttcagcaaatgatggcgcgtccggttgaagggatggcggcgattcaacgtgcgattgacagtgtttctcattatctggtgctgaaaacagccatcagcatcatcaccggcctggtcgcctgggcgatgctcgccgcactcgatgttcgcttcgcttttgtctggggattgctggcctttgcgcttaattacatcccgaatattggttcagtcctcgcggcaatcccccctatcgctcaggtactggtgtttaatggcttctacgaagcgttgctggtgctggcgggatatctgctgattaatctggtcttcggcaatattctggagccgcgtatcatggggcgtgggctggggctttccacattggtggtatttttgtcgttgattttttggggatggttgttaggaccggtgggtatgctgctttccgtgccgttgacaattattgtcaaaattgcgcttgaacaaacagcgggaggtcaaagcatcgccgttctgttaagcgatctcaataaagagtgacggcctcagcagaggccgtcagggttacagagctttcaggattgcatccacgctggctttggcgtcaccaaacagcatgtgggtgttttccttgaagaacagcgggttttgcacaccagcatagccagtgttcatcgaacgtttaaagacaatcacgttctgcgctttccacacttccagcacaggcataccagcaatcggactcttcggatcatcctgcgccgccgggttaaccgtatcgttagcaccaatcaccagtacggtatcggtatcagcaaagtcatcattgatctcgtccatttccagcacgatgtcatacggtacttttgcttcagccagcaatacgttcatatgtccaggcaaacgccccgcgaccgggtggataccgaaacgcacattaataccacgagcgcgcaatttctcagtaatttcagcgacaggatattgcgcctgcgcgactgccatgccgtaccccggagtaatgatcactgaatgggagtttttcagcagttccgctgtctcttctgcggtgatttcgcggtgctcacccacttcctgatcatcgccagtagaagagccgtcggtgccgaaaccacccgcaataacgctgataaaggaacggttcatcgccttacacataatgtaagaaaggatagcccccgaagaaccgaccagcgcaccggtcacaatcagcaggtcgttgctgagcataaagcccgcagccgcagccgcccagccggagtacgagttcagcatcgacaccaccactggcatatctgcaccaccgatggaggcgactaaatgccagccgaataccagcgcaattgcggtcattatcagcaatgccagcacttgcaggccgacgctgtccgtgcgaacaaatacaatcagcagcaggaaggaaacgaccagagccgccaggttcattttgtgacggtttggcagcatcaatggtttagacgaaatcttgccacacagtttgccgaacgccaccaccgaacccgtgaacgttaccgccccgatgaagataccgaggaacacttccgtcaggtgaatattgaccagaatcggtgccattcccgcgtcatgatgcagatagctgttaaagccaaccagcactgccgccagacccacgaagctatgcaggatcgccaccagttctggcatttcggtcatttcaactttcttcgccagacggataccaattgccccaccaatgaccatcgccagcaagatccagccaacattacccgtatccggtccaaaaatggttgcgattaacgcaatcgccatcccggcgataccgaagttgttaccctggcgagacgtttcatgtttcgaaagaccggccagactgaagataaacaggatcgcggcaacaatgtatgcagctgtaactaatcctccagacatatgttaccccttaatttttgcggaacattttcagcatgcgctgagtcacggtgaagccaccgaaaatattaatgctggctataagcaccgcgataaaactaaggaagctaacccagccgccctggccaatctgcaacagtgctccgacaacaataatccctgaaatcgcgttggtgaccgacatcaacggtgtatgcagcgcgtgcgatacattccacaccacgtaataaccgacaacgcaggccagcgcgaaaacggtgaagtgcccaaggaattctttcggcgcaacgcttgccatccagccaaaaagaatgattgccagcgccatcaacgcgtatttacgccacggtgagcaggtacatttttcctcagttttcacttccggtgccgctttttgtgccgcctgcggctgagctgatacctgaatcggcggtgccggccaggtaatttcgcccgcacggatcacggtcacgccgcgaatcaccacatcatcaaaatcaacagtgatattgccgtctttctctttgcacaacagtttcagcagattaacgaggtttgtgccgtaaagctgtgaggattgcgtcggcagacggcccggaagatcggtataaccaatcactttgacaccattttccgtagtgaagatttcacccggcacggtgtattcacagttgccgccgttttgggctgccaggtcgacaatcacactgcccgccttcatggagtcaaccatttcacgggtaattagcttcggcgctggtttgcctggaataagcgcggtggtgacaatgatatcgacctcttttgcctgggcggcaaagagttccatttccgctttgatgaacgcgtccgacatcactttggcatagccatcgccgctgccagcttcctctttaaaatccagctcgaggaattccgcgcccatactttgaacttgttctttcacttccgggcgggtgtcgaatgcacgcacaatcgcgccgagactgtttgctgcgccaatggcggccagacctgcaacacccgcaccaatcaccatcacttttgccggtggcactttcccggccgcagtaatttgcccggtaaagaagcgcccaaattcatgtgccgcttcaacaatggcgcgataaccggcgatgttcgccatcgagcttagtgcgtccagcgattgtgcgcgtgagatacgcggcacagagtccatcgccatcacggtcacgttacgttccgcaagtttttgcattaattccggattctgcgcaggccagataaaactcaccagcgttgtcccaggattcagtaacgcaatttcatcatctaacggcgcattgaccttcagaatgatctctgactgccagacgctattcccttctacaatttcagcgcccgcttgcacaaacgctttatcgtcaaaacttgccagttgacccgcgccgctctctaccgcgacggtaaaacccagtttcagcagctgttccactgtttttggcgttgctgcaacacgggtttcattggttaaccgttctcttggtatgccaattcgcatgatattcccttccatcggttttattgatgatggtttgcctgtgtcaggagccacacaagctgctcatgtacgagctaaatgttactccgttaaaataaattagtaacaaacgccctataacgtactgaaaattatgcctgtgatctagcgccaaaaatcagtatttcggcgtgaactcgcaaaatattaacgattcagccgtgatagtgggataaacaccttagaacgccggataaagactgataattgtcttcgacggtcgggtaaaacgagacatcgccccggcacgaatcactacttaacattaaattaacttatacaattcagttgcttcagtagtaatgatgctgatacggctgttttttaagcatagacggtcatttgagcaggattaaaattggcttaaggaatgtgatatgaaaaatgacgcagacagttacaccgtttaaatgcaataatcagccacgtttctcgttaataacaataccagtacctggtttgcgcaaggcgaaggattatttttatgaagcttaagaacaccctcctggcgtcggcactgctttctgctatggcattctccgttaacgcagcaacagaactgacaccggagcaagcggcagcggttaaaccttttgaccgtgtagtggttaccggtcgttttaatgctattggcgaagcggtgaaagccgtttctcgtcgcgcagataaagaaggtgccgcctctttttatgttgtcgacacttctgattttggtaacagcggtaactggcgtgtggtcgctgacctctataaagccgatgctgaaaaagcagaagaaacaagtaatcgcgtaattaacggtgttgtcgaactgccgaaagatcaggctgttctgattgaaccgtttgacacggtcaccgtccagggcttctatcgtagccagccagaagtcaatgatgccatcaccaaagcggcaaaagcgaaaggtgcctactctttctacatcgttcgtcaaatcgatgccaaccagggcggcaaccagcgtattactgcattcatctataaaaaagatgctaagaaacgtatcgtccagagcccggatgtgatcccggcagattccgaagcaggacgtgcagctctggctgccggtggcgaagccgcgaagaaagttgagatcccgggtgttgcgactaccgcatcaccaagttctgaagtcggtcgcttctttgaaacccagtcatcaaaaggcgggcgttacaccgtcacgctcccggatggcactaaagtcgaagaactgaacaaagcgaccgcagcgatgatggtcccgttcgacagcatcaaattctctggcaactacggcaacatgaccgaagtctcctatcaggttgcgaaacgtgccgcgaagaaaggtgctaagtattaccacatcacccgccagtggcaggaacgtggtaataacctgaccgtcagcgcagatctgtataaataactattcagttactcctataaggcggcttgatgccgcctttcgcatttttagtcacaaatttccccgcgaccattgcatgcagacacatctcttcgtaaaatcccgcgcttcagtggcaaactccatttttatgcgttttgccctaatatttattcttcttatcacgttttaatcactggatatcgatggaaaagaaactgggactgagcgcactcaccgcgctggtattaagctcaatgctgggcgcgggtgttttcagtctgccgcaaaatatggcggcagttgccagcccggcagcactgctcatcggctggggtattactggcgctggcattttattgctggcctttgccatgctgatcctcacgcgcattcgtcccgaacttgacggcggtatctttacctatgcccgcgaagggtttggcgagctaatcggcttttgttccgcatggggatactggctgtgcgcagtcatcgccaacgtctcctatctggtgatcgttttttccgcgttaagcttttttacggacacgccggaattgcgcctgtttggcgatggtaatacctggcaatcgatagtcggtgcatcggctttattgtggattgttcactttttgatcctgcgcggggtgcaaaccgctgccagcattaacctggtggcgacactggcaaaattgttgccgctgggtctgtttgttgtgctggcgatgatgatgttcaaactggataccttcaagctcgacttcaccggacttgcacttggcgtacccgtttgggaacaggtgaaaaacaccatgctgatcaccctgtgggttttcattggtgtggaaggtgccgtggttgtttctgcgcgtgcgcgtaataaacgtgatgttggcaaagcgacactgctggcggttctctccgctctgggcgtttacttgctggtaacgctgctttcgctgggtgtggtggcacgtcctgaactggctgaaattcgtaacccgtcaatggccggtctgatggtggaaatgatgggaccatggggcgaaatcatcatcgctgccggtttgatcgtttccgtttgcggcgcgtacttaagctggaccatcatggcagcagaagtaccgttcctggccgccactcataaagcattcccgcgcatttttgcgcgccagaacgcacaagctgcgccatccgcctcactgtggttgaccaacatctgcgtgcaaatttgtctggtactcatctggctgaccggttccgattacaacacgttgctgaccatcgcctcagaaatgattctggtgccctatttcctggtcggcgcgttcttgctgaaaatcgcaacccgtccactgcataaagcggtaggtgtcggtgcctgcatttatggcttatggttattgtacgcctctggtccaatgcacttgctgttatccgttgttctgtatgcaccggggctgctggttttcctgtacgcgcgcaaaacgcatacccatgataatgtactgaaccgtcaggaaatggtgctgattggcatgctgttaattgcctcagttccggcgacctggatgctggtgggataacgttcatcccatcgttggatagcaaaggagataacgatgggtaaaacccagcccttgccaatattaattactggcggaggtcgtcgcatcggcctcgccctcgcatggcatttcattaatcaaaagcaaccggtgattgtcagctatcggacacactatccagccattgatggactgattaatgcaggtgcgcagtgtattcaggctgatttttcgaccaacgacggtgtgatggcgtttgccgatgaagtactaaaaagcacccatggtctgcgtgctattttgcataacgccagtgcgtggatggcggaaaaaccgggtgcgccactggccgacgtactggcttgcatgatgcagatccacgttaataccccatacctgctcaaccatgcgctggaaagattactgcgtgggcacggacacgccgccagcgatatcattcactttaccgattatgtggtggagcgcggtagcgacaaacatattgcgtatgctgcaagcaaagcggcactggataatatgacccgctcgtttgcccgcaagctggcaccggaagtgaaagtgaattctattgcgccatcgctgatcctgtttaatgaacatgatgatgccgaatatcgacaacaggcgctgaataaatcactgatgaaaaccgcgcctggcgagaaagaagtgatcgacctggtcgattacttacttaccagttgctttgtcaccggacgcagtttcccacttgatggcggtcgtcatctgcgttaatgcagctttatccagcatataatcaacacccatgcgcttatcccccaacacgcaacagaaccaacaaaagcggcgggcaagcgcatcattccggtgaaataccacagcgacaccaggtaaacaaaatagggaataatcgaccacatactaaaaatgatggttgcgcgtaaggcttcaatgccgcgttcgctggcaacaatataatgcgcgataagcgcaaaggtcgggaaaagtggaatcagcccggcgatataataatttttcgtttttgctaaaacaccaatcaacagcactaccagcgcaccgagcgcggctttgattaccagccccatctttttaccttaacacttccataacaagtcatcagtagaatacctgatgaaaacttgtttagaaacgattgatagtaagtaaaaacagcgcggtgtattgtgacgtttttatatctaccgtgaatgttatgaacactatcgtatttgtggaagatgatgcggaagtcggttcactgattgccgcgtacctggcaaaacatgatatgcaggttaccgtagagccgcgcggcgaccaggccgaagaaaccattttgcgagaaaatccggatttggtgttactcgacatcatgctaccaggcaaggacggcatgaccatttgtcgtgatttacgcgcaaagtggtctggaccgattgttcttctaacctctctcgatagcgatatgaaccacatcctggcactggaaatgggtgcctgcgactatattctcaaaacgacgccccctgctgttttgctagcgcgtttacgtttgcatttgcgtcagaatgagcaagccacactgaccaaaggtcttcaggaaacgtctctgactccctacaaagccctgcatttcggcacgttgaccatcgatcccatcaaccgcgtagtcaccctggctaacactgaaatctcgctctcgacagctgatttcgaattattgtgggaattagctacccatgccgggcaaatcatggaccgcgatgcattgctgaaaaatttacgcggcgtcagttatgacggactggatcgtagcgtggacgtggctatttcgcggttaagaaaaaaactgctcgataacgccgcagaaccttatcgcattaaaactgtgcgtaacaaaggctatctttttgcgcctcatgcatgggaataagcgatgaaaaaactgtttatccagttttacctgttattgtttgtctgcttccttgtgatgtctctgctggttgggctggtgtacaaatttaccgccgaacgcgcgggcaaacagtcgctggatgatttgatgaacagttcgctgtatctgatgcgcagcgaattgcgtgagatccccccacacgactggggtaaaactctgaaagagatggatttaaatctctctttcgatctgcgtgtcgagccactgagtaaataccatcttgatgatatttccatgcaccgactgcgtggcggcgaaattgtcgccctggacgatcagtacacgtttttgcagcgtatcccgcgcagccactacgtgctggcagttggtcctgttccttatctttattatctccatcagatgcgattgctggatatcgccctgatcgcttttattgctatttccctcgcctttccggtgtttatctggatgcgtccgcactggcaggatatgttaaaactggaagcagcggcgcaacgatttggcgatgggcatctcaatgaacgtatccactttgatgagggttcgagctttgaacgacttggcgtcgcatttaaccagatggcggacaatatcaacgccttaattgccagcaaaaaacagcttattgacggtatcgctcacgaactgcgaacaccgttagtgcgcctgcgttatcgactggagatgagcgataacctgagcgccgccgaatcccaggcgttgaatcgtgatatcagtcaacttgaagctttaattgaagagctgctgacttatgcccgactcgatcgcccacaaaacgagcttcatcttagcgaaccagacctgccgttgtggctgtcaacgcatctggcagatattcaggcagtaacgcccgataaaacggtacggataaaaacgctcgtgcaaggccattatgcggcgttggatatgcgcttaatggagcgcgtgctggataatttgctcaataacgccctgcggtactgccattcaacggttgaaaccagcctgctactgtcggggaatagagcgacattaattgttgaggatgatggcccagggattgccccagaaaaccgcgaacatatctttgaaccttttgttcgcctcgatcccagccgggatcgctcaaccggcggctgcgggctggggctggcaattgtccactctatagcactggcaatgggcggtacggttaattgtgacaccagcgaactgggtggtgcccgcttctcgtttagctggccgttatggcataacatcccgcaatttacctctgcctgacactacgcgcacgatggtcaagtcaccacgactgtgctataaaataagtatgttgtaactaaagtggttaatattatggcgcgttacgatctcgtagaccgactcaacactacctttcgccagatggaacaagagctggctatatttgccgctcatcttgagcaacacaagctattggttgcccgcgtgttctctttgccggaggtaaaaaaagaggatgagcataatccgcttaatcgtattgaggtaaaacaacatctcggcaacgacgcgcagtcgctggcgttgcgtcatttccgccatttatttattcaacaacagtccgaaaatcgcagcagcaaggccgctgtccgtctgcctggcgtgttgtgttaccaggtcgataacctttcgcaagcagcgttggtcagtcatattcagcacatcaataaactcaagaccacgttcgagcatatcgtcacggttgaatcagaactccccaccgcggcacgttttgaatgggtgcatcgtcatttgccggggctgatcacccttaatgcttaccgcacgctcaccgttctgcacgaccccgccactttacgctttggttgggctaataaacatatcattaagaatttacatcgtgatgaagtcctggcacagctggaaaaaagcctgaaatcaccacgcagtgtcgcaccgtggacgcgcgaggagtggcaaagaaaactggagcgagagtatcaggatatcgctgccctgccacagaacgcgaagttaaaaatcaaacgtccggtgaaggtgcagccgattgcccgcgtctggtacaaaggagatcaaaaacaagtccaacacgcctgccctacaccactgattgcactgattaatcgggataatggcgcgggcgtgccggacgttggtgagttgttaaattacgatgccgacaatgtgcagcaccgttataaacctcaggcgcagccgcttcgtttgatcattccacggctgcacctgtatgttgcagattaacgcccggctttcatactgccgaccatctgttctggccgtacccagctgtcaaactcggcttcgctaagataccccagcgcaagggccgcagcttttaaggtcagcccttctttatgcgcttttttggcgatctcggcggctttgtcataaccaatgtgggtgttaagcgcagtcaccagcatcagcgattcattgagtaattgattgattcgctcacgattcggttcaatacccactgcgcagtgtttgttaaaactttccatgccatctgccagcaagcgcaccgattgcaggaaattgtggatcaccattggacggaagacgttcagttcaaagttaccggaagcgccccccatgttgatcgccacgtcgttccccatcacctgacagcagagcatggttaatgcctcacactgtgttgggttcactttccccggcatgattgagctgcccggctcattttccgggattgagatttcaccaattccgcagcgcgggccagaggccagccagcggacatcattggcgattttcatcagtgacgcagccaaccctttcaacgcgccgtgcgcctgaaccagggcatcacaggtcgccagcgcttcaaatttgttcggcgcggtaacaaacggtgcacaggtaatgactgccagttcatctgctacgcgacgcgcatactccggatgggtatttagtccagtacccaccgctgtaccgccaagagccagttccgctacgtgaggcaggctgtattcgatatgtttgagattatgctcgagcatcgctacccagccggaaatctcctgccccagcgttaacggcgtggcatcctgcaagtgagtacgaccaattttgacgatatcggcaaaagcacgggatttctcattcagtgtctgtgtcagggttttaagctgaggaatgagttgcttgcgcagcgccagcagcgccgcaacgtgcatcgccgtcggaaagacatcgttggaactttggcttttgttcacgtcgtcgttagggtgaactttacgttccatcccgcgcacaccgccgagtaattcactggcccggttagccagcacttcgttcatgttcatgttactttgcgtgccggagccggtctgccagatagccagcgggaattcgtcgtcatgctgtcctgccagtacttcatccgccgcctgacgaatggcgctcgctttctcttcagacaacaagcctaaatcttcattaacttttgccgctgcacgcttggttagcgccagcgcatgaatcagtgaggtgggcattttctccgtcgaaatgcggaaatgctccagcgagcgttgagtttgtgcgccccacagcttatctgccgggacatcaatcgcccccatcgaatctttttcgctgcgtactgtattcatgacctgctcctcacctgattaattttttctttctgttttgctttcgttaagcaacttttagctcacttattatttaccatttgataacaaatgtttggtctttcgtgccatgtaaaaaaaccgccccgaagggcggctctgtttatttcacacagcgggtgcattgtgtgagttgtatctgctggaagaagtcatttcctttatcatccacaaggataaacgccgggaaatcttccacttcaattttccagatggcttccattcccagttccggatattcaacacattccaggctcttaatacttccctgcgccaatacagcggccggaccaccgatactgccaaggtagaagccgccgtgttttttacaggcatccgtcacctgctggctgcggttgcctttcgccagcatgatcatacttccgccctgcgcttgcagttgatcgacataagaatccatccgtccggcggtcgttgggccaagagaaccggaggcataaccttccggcgttttggccggacccgcgtagtaaatcggatgatctttgatgtactgcggcagcccttcaccgttatccatccgctctttcagtttggcgtgagcaatatcacgaccgacgataatcgtgccgttaagcgataagcgtgtagaaacgggatactgcgacaactgtgcgaggatctctttcatcggacggttaaggtcaacgcgcaccgcttcgccttctcccgctttgcgcagctcttccgggatatatttgcctggattatgttccagtttttcgatccagatcccctgacggttgatcttcgctttgatattacggtcagcagagcaggagacgcccataccgaccgggcaggatgcgccgtgacgtggcaggcgaatcacgcggatgtcgtgagcgaagtatttaccaccaaactgcgcacccagaccaagattttgcgcttcgatcagcaattctttttccagttccacatcgcggaacgcctgaccgtgctcattcccttccgttggcagttcatcatagtatttcgcggaagccagtttcaccgttttaaggttcgtttctgcagaagttccaccaataacgaacgcaatatgatacggaggacaggccgccgtacccagcgtgcgcatcttctcaaccaggtaatttttcagtttccccggcgtcagtaacgctttggtttcctgatagagatacgtcttgtttgccgaaccaccacctttggcgatacagaggaatttgtattcgtcgccatcaacggcataaagatcgatctgcgctggcagattggtgccggtattcacttctttatacatatccagcggcgcgttttgcgagtagcgcagattatcttcgatataagtgttatagacaccgcgcgccagcgccgcttcatcaccaccaccggtccatacacgctgcccttttttaccaacaataatcgcggtgccggtatcctgacaggttggcagaacgcctttcgccgcgatgtcggagttacgcaggaattgcagcgccacatatttatcattttcgctggcctccgggtcacgcagaatgtcggccacctgttgttggtgcgccggacgcagcatgaacgacgcatcatgaaacgcctggcgcgccaacagagttaacgcttcgggtgcgactttcaaaatctcctgcccttcaaattcagatacgctaacgtgttcgctggttagcaggtaatactcagtatcatcttttttgagtggaaaaggagcctgataatgaaagggtttgtttgacattgttctctcacttactgcctggtttggttatgctctgggcgggtgttccgttgccctgttaaaagcgagtaacaatatcctacacacttttttaacaaaaactgagactagtacgactttttgcggctccaggttacttcccgtaggattcttgctttaatagtgggattaatttccacattaaaacagggattgatcatgcaaaaactcattaactcagtgcaaaactatgcctggggcagcaaaacggcgttgactgaactttatggtatggaaaatccgtccagccagccgatggccgagctgtggatgggcgcacatccgaaaagcagttcacgagtgcagaatgccgccggagatatcgtttcactgcgtgatgtgattgagagtgataaatcgactctgctcggagaggccgttgccaaacgctttggcgaactgcctttcctgttcaaagtattatgcgcagcacagccactctccattcaggttcatccaaacaaacacaattctgaaatcggttttgccaaagaaaatgccgcaggtatcccgatggatgccgccgagcgtaactataaagatcctaaccacaagccggagctggtttttgcgctgacgcctttccttgcgatgaacgcgtttcgtgaattttccgagattgtctccctactccagccggtcgcaggtgcacatccggcgattgctcactttttacaacagcctgatgccgaacgtttaagcgaactgttcgccagcctgttgaatatgcagggtgaagaaaaatcccgcgcgctggcgattttaaaatcggccctcgatagccagcagggtgaaccgtggcaaacgattcgtttaatttctgaattttacccggaagacagcggtctgttctccccgctattgctgaatgtggtgaaattgaaccctggcgaagcgatgttcctgttcgctgaaacaccgcacgcttacctgcaaggcgtggcgctggaagtgatggcaaactccgataacgtgctgcgtgcgggtctgacgcctaaatacattgatattccggaactggttgccaatgtgaaattcgaagccaaaccggctaaccagttgttgacccagccggtgaaacaaggtgcagaactggacttcccgattccagtggatgattttgccttctcgctgcatgaccttagtgataaagaaaccaccattagccagcagagtgccgccattttgttctgcgtcgaaggcgatgcaacgttgtggaaaggttctcagcagttacagcttaaaccgggtgaatcagcgtttattgccgccaacgaatcaccggtgactgtcaaaggccacggccgtttagcgcgtgtttacaacaagctgtaagagcttactgaaaaaattaacatctcttgctaagcttattaaaggcttataacaccttcaggcggccagtccgcctgatttcattttatggataatcattatgaataaatcgctggtagcggtaggcgtcattgttgcgctaggcgtagtctggacaggcggcgcatggtatacaggcaagaagattgaaacccatctcgaagacatggtcgcgcaggcgaacgcgcaactcaaactgacagctcctgaatccaacctggaagtgagttatcaaaactatcatcgcggcgtattcagcagccagttgcaactgttggtgaaacccattgccgggaaagaaaatccgtggattaaaagcggtcagagcgtcatcttcaacgaatcggttgatcatggtcccttcccgcttgcccagcttaaaaaactgaacctgatcccgtcgatggcatcaattcaaaccacgctggttaataacgaagtaagcaaaccactgtttgatatggcaaaaggtgaaacgccttttgagattaactcgcgcattggttacagcggtgattccagttccgatatttcgctcaagccactgaattacgagcaaaaggatgaaaaagtcgcctttagcggcggcgagttccagttaaatgctgacagagacggcaaagccatctccctttccggggaggcgcaaagtggtcggatagacgcagttaacgaatacaaccagaaagtgcagttgacctttaataatctgaaaaccgacggttccagcacgctggcaagttttggtgagcgtgtaggaaatcaaaaactgtcactggaaaaaatgaccatttcagtggaaggcaaagaactggcactgctggaaggcatggagatcagcggtaaatcggatctggtcaatgacggtaaaacgatcaatagccaactggattactcgctaaacagcctgaaggtacagaatcaggatctgggcagcggcaagctgactttaaaagtcggccagattgatggtgaagcctggcatcagtttagccagcaatataacgcgcaaactcaggcgctgctggcacagccagaaattgccaacaaccccgaactttatcaggagaaagtgacggaagccttctttagcgccctgccgctgatgctgaaaggcgatccggtgattactatcgcgccgctaagctggaaaaacagtcagggtgaaagtgccctgaatctgtcgctgttcctgaaagatccggcaacgactaaagaagcgccgcaaacgctggcgcaggaagtagatcgttcggttaaatctctggatgcgaaactgaccattccggtggatatggcaactgagtttatgactcaggtagcgaagctggaaggttatcaggaagatcaagcgaaaaaactggcgaaacagcaagttgaaggtgcatcagcaatggggcagatgttccgtctgaccaccttgcaggacaataccatcaccaccagcctgcaatatgctaacggtcagataacgttaaatgggcagaaaatgtcgttagaagattttgttggcatgtttgcgatgccagctcttaacgttccggctgtaccggcaattccgcagcagtaattcacggccaaaacgccggagaattttcactccggcgttttcatctgaaaacaaaccagagattgcctgatgcgctacgcttatcaggcctaccttttcctgcaacactttgaatttatgagtttttgtaggctggataaggcgtttacgccgcatccggcataaaaaacgcgcactttgtcaacaatctgaaacgccggagatttttctctccggcgttattttttacttcagcataaagtcatactgaatactcattttcacatcccagtaattcaggcgatcgcccagcgtactgccatcgcgcttttcccgccctttatcggcagcaagaaagaaattcatcccttgtaacggcccttcgctgacccgatagttcataccacctaagatacccgtgccttcaatccgcacatctcgtttactggattcatagccgcgagtcacaatcggtgcaaatgtcagcgtaaattgcggcgttaaacgatagttgacgcccaattgccaggactgcattccttcacggttacgatcaagacttaatgaaaagggatagccaatgtcggtatccaccacggcaccattcattgcatggcgcaaataaccaccactgccaaatacacttccccacggcgcattccaggtcaattgtccactaaccaacgccgtttcattgggctggctggtattacgacttaaaccttcgagctgcgcgtaaaagccgagcaactcccctttcaacgtataattcgggtcgagcggtatgcttttctcgagaatactttgtatctgattggaaacatctttctgtaccgatgcccccagagaatagcgactggtatcatcatgccaactggcggctaaaaaagaacgtgcgcgatgtttatcgtattttcccgtctggctgttatacaccccttcatcacgaataccggttgttgaatcagtccataaaaatactcgtgaacgccacattccccacagatcaatatttggtgttaaagcccaataacctaatgctccttcagaaactgtcggtaatgtacgttgcgaactgccagccattaacggaatacgataaggtaagctaccataactataatccgtcccgaagcgacctaatttaagcaggctattttcactgggttttatttttactgcccccagggcaaagccaaaacttttatcaccatcaagataccaccgggtactcatatcagcacgagcacctaatttataaacataatacgccccgccttcaacgccaataatattggaataataaccactattgaaatcgagcaatcctccctgtacccatgcgtaaatatctcttcccgcgccagcactgggcttatccgccctgcgcaattcgtttttcagtctgatgcgtagtcccgcttcatcgtcagccagttgcgccgcataagcagaggtaaggccagaggcagccgtcaggcaaataacggccatggccactatttttctcatagttgcacctttgatgttctgattatttttattgaatattaattagtgatatcgctgattaattgctgctgcacttttttacgattatcaatttcaaccacgatttctttgaattttttatccgtgagcggataaaaccagataataacgaatgccagtagcataaatccgcaaggtactaaggcaattgatgtgcggatgcccataataacttccggcgtttgcacctgattggcgatatatccgcttaaccccaaaataaaggcaggaattgaacctccgattgcctgaccgcatttacgggtaaatgagaatagtgaataggtgagcccttcaattcgcacgccggtcaggtattcaccgtattctacggtatcagcttccagcgcccacatcacggtcatggtaacgccctgaccaattgaagcgatggccaacgcaaccaacgccaccggcagtgaccagacggaaacccagaagaacagcagataaccgcaggttcccagcaaagcgccaatcaggaaggtattctttttaccgatcctcgcgaccatccccggcaccagcggtgccgatgccacagtaccaaccaggttttgcaccagtaccagcacagtgaacagcccggtatcatttaacacatagcgcacgtagaacaacgacgaggcgctgaccgcaaaggtcgaaatcagcacacacagcgcaccgatgcacaacataaacagcgggcgattccgtttcagggtttgcagactgatattcaatgacggctgcgcaacgatacgtaccacattctcacgcgtcgatttgaagcagatgaagtaaagcaccattccggcaatcgccagcacaattgtccagaaatggtataccgacaccatctcttccgggctggagttcttaatgctcggtcctatcagaaatgccaggcagacaaaggtcaatgaagcggcaatcccacgagccgcgcccagacgggcgcgggattgtggttgttgggtcatcgcggtagcaagtgaaccataaggaatattcaccaggctgtagcaaagcccgaggcccatgtaggtcaaatatgcatacaccactttgctaccatggctccagtcggtcagcacccagaataccagcacgctgaagatcattaacggcgcagtaccgaagagtaaaaacgggcggaattttccccagcgggtattcacactgtccaccactcgtccggcaaagacgtcggcgaaggcatcgaatacccgcaccagtaacagcatggtgcccgccgcagcggcaccgacgccagcgacgtcggtgtagtaactcaacaggaagagcgcccccattgcgaaggcgaagttattggcgacgtcaccgaggctgtagccgacgatggtgcgccaggagagttgttgattcattgtttgcctccctgctgcggtttttcaccgaagttcatgccagtccagcgtttttgcagcagaaaagccgccgacttcggtttgcggtcgcgagtgaagatccctttcttgttaccgccaacgcgcaatatgccttgcgaggtcgcaaaatcggcgaaattccatacctgttcaccgacgacggcgctgacgcgatcaaagacgcggtgatacatatccagccatgcacactgatactcttcactccacatgtcggtgtacattgagtgcagcccggctaacgtatccacgccgtattcggtgatgataatcggctgatgcagtttctcctgccaggccagaagttctttttccagtaccttctctgccgtttccaaatcgccgctttggacataccatccgtaataacggttcaggcacagcacatcaaagagatcgctgatggtatcggtgtgagcgtcgcagaacattacattgacgcaggtgatcggacgcgtcgggtcgagtttacgcgttgcttccgccagtggcgcgaaatattcccgtgcaccttgcggacgggtatccggttcgttggcaatactccacatcaccacgcttgggtggtttttgtcacgcgctatcagctctttaatcgcctgtaagtgcgcttgctgagtttccccgttgactgcctcttcgctgtacagttctttcggcttgttgcccgcttcgaaaccaatgcctaaagagaggttaaagccgacagcagcagtttcatcaatcaccacgatgccatgttcatctgcccagtcgagcatctcttcagcgtaagggtaatgcgaggtacggtaggagttggccccaatccagtccattaatgcgtggtcgtgcaccatcagcacgttatcgaatcctttgccacgcaagtccgcatcttcatgacgaccaaagccagtaaagtagaacggtttgtggttaatcaggaactgttcgcccttcactgccactgaccggatgccgacgcgaagcgggtagatatcacactctgtctggcttttggctgtgacgcacagttcatagagataaccttcacccggttgccagaggtgcggattcaccacttgcaaagtcccgctagtgccttgtccagttgcaaccacctgttgatccgcatcacgcagttcaacgctgacatcaccattggccaccacctgccagtcaacagacgcgtggttacagtcttgcgcgacatgcgtcaccacggtgatatcgtccacccaggtgttcggcgtggtgtagagcattacgctgcgatggatcccggcatagttaaagaaatcatggaagtaagactgctttttcttgccgttttcgtcggtaatcaccattcccggcgggatagtctgccagttcagttcgttgttcacacaaacggtgatacgtacacttttcccggcaataacatacggcgtgacatcggcttcaaatggcgtatagccgccctgatgctccatcacttcctgattattgacccacactttgccgtaatgagtgaccgcatcgaaacgcagcacgatacgctggcctgcccaacctttcggtataaagacttcgcgctgataccagacgttgcccgcataattacgaatatctgcatcggcgaactgatcgttaaaactgcctggcacagcaattgcccggctttcttgtaacgcgctttcccaccaacgctgatcaattccacagttttcgcgatccagactgaatgcccacaggccgtcgagttttttgatttcacgggttggggtttctacaggacgtaacataagggactcctcattaagataataatactggtcaacctttaatctgattagttaaccaattctgtgttgcacacagttatctgtgagaaacccatggaagagaaatggaaataaaaagaactgacaccgcgatcaaaaaaccaaaaactgcaatacccacagcgtgatatagatcgcattaatctttaaaacagcgttgacagaagccataaaataagcaaccgaacgttcgttcgagcgtattgggaacgataaactctcatgacatatggctacagtgaatattttggggggaattctccgaagccgggaaggataatttttgcacagagaaattacgatatgaaacgcgggcacagttatcaccagcccgccgaaaaagagagagaatcaggatgcggttaagataccgccaatcatcgcgcgtaatccctgagcaaacgacgcttcacgcgccaggtcttccgcttcgatatcggccagtacaccgtaggtcagatccagcagtaaacgtgaagtcattgccgtgttgatgtctgggcttatctcgcctttttgctgggcatcacgcatccgctgggcaacaaattccgtgatcgtcatatgcttatttttaagcatggcggcgacctgtgggttacgcatcccttccgccataatttcaaccaccagcgcccgttgtccaaaggcttcatgggtgagagagacaatggactcgaccatatagtcaacgaaatgaatcccttcaatcggttcccggaaacgggccagcgccctctcctggtcctgtaagataatcgcctgaatcaaggcttctttggagatgaaatggtgatagagcgtcccgggactaatggcgcaagatttacagatggctttcatcgaggcactgtgaaatccattttctgaaaaaatctctctggcagcattgaggatccgggtccgtgtcggttgtgcttcagtctgcatgttatccatcattaaaccattatagttagcgtgaataactagtttaccgcgttgtcaggtgagcgcctatcattgctgttgaatagtgcgaaggcacactctattcgtatacttttcactctgaaattggttaaccaatagccgtgatttggctgccagttatttagcagagacgttgatgagtttatcccggtaaacaacacgcacggttgtttaccggtccgttagtgtattaattgagctcctgtaccccaccaccggagacggtgagaatttgtccgcttacccagctcgcagcaggcgagcaaaggaacagcgctgcgttagcaatatcttgcggttggcccagacgtctgatcggcgtgtgctgtaacattttttgttcaatttctggtgtaataacggatttcagggcatcggttaatattgcccccggcgcaatgccatttacccgaatatttttttcacccaggtcaaacgccatatttctgaccagatgactggccgcagctttagatgatgcataggaagtcatgtttatatttttattttctgccgccatagaagtgatggtcagaataacgccaccgccatttttttccatttctggcgcaacaagttgtgacagatggaaaaaagaaaacacattcagttcataagcacggcgaaaatccgccattggcatatcaaacggtttaggtccaccgccaccggcgttgttaaccagaatatcaactttacccagcttactgatagcaaagtctgccagtgcagagagttcctgttcggaagtaatatcacaacggcaggcaaatgcctgaccacccagttgttgaatttcgtctacaacatggttagctgcgtcggcgttaatatcactgaccaccacagatgcgccagctgtcgcgaatgtaatggcgatttctttaccaatacctgcacccgcacctgtgatgatggcgcattttccgtcgagtctcaggttgtcagaattaaacacataaacctcctgtgaacttcagtaaaaataaaaggcaccgcctgtgtgccacattttttatcattaaccttgaggaaaggacactaccaggtatagcagataaagagaggattatttcgctgcaatgagccgggcgggaataataagattgcgtgaatgcgtctcttcatgggtgattttttgcatcatgcgatccgcaagtgtgataccaagttcccgcgctggcgtgctggcccaggtaacaggtatatcatcaagtgtggttggtgtcgcatcggtaaatgccgccagcgaaacctgttgctcaaagtaacgatcgactccgctttccccgctttgccgccctgctttgagcaaaccaaaccatgcccccatcgcaatagtttcgttatagcaaaccacggcactgatggtcgggttatgacgtaaaagcgccgtgatagcttccgcggcttgcttctggctggaagtgcactccaacacccaatcgctatgaaacggcaggccaaattttagtagagttgcacaatagcccccaacccgttctgcacgggttaatgaggaactttgccctcccagccaggcgatccgctgatgcccattgcgaatgagatgctccgtcaacaactgtgcagcctgcatgttgtccgggcgaaccgtatcaacatcatcaagataactggcacgggaagcgaaaatcaccgggatagctttttcttctgccatccgtcgcaggtcatcgctacttcctgcagctccggcaattaccacaccatcgacaccctgattcagtaacagtgaaaaccgctgtgccagctgctcaccgtctttaccgccgtgaagcaaaaaaaccatccgtccctgcgcttccagagcttccgtcaatccggccgtcaattcggcgtaaaacggcgcagataaatcacggacgatcaaaccaatgacgccgctttgcccgccgcgcagcgccgacgcctggcgattgcgcacaaatcccagctcttcaatggcggcgttaacgcgttctcctgtggcggtagagattcgccctttgccactaagcaccagcgaaacggtacttaccgacacgcccgcagccagcgcaacatcatgaatggttatttttttggcggtagccatgcagatgacctactccctgattatgtgacagataaaacgttttaccttttatttatcttatacccgctattatcgttgcgtaatgtgatttatgcctcactaaaatttgataaaacgttttatcttctcgcgcaatttactgaatccagattgttctctacgaggagtcgttttatgacggcgaaaacagcaccgaaagtcacgctgtgggagttcttccagcagttaggcaaaaccttcatgttacccgtggcattattgtcgttctgcggcattatgctcggcattggtagttctcttagcagccatgatgtcataaccctgatcccggtcctgggcaaccccgtgttgcaggctatctttacctggatgagtaagattggctcgtttgcttttagtttcctgcctgtcatgttctgtatcgccatcccgctgggcctggcacgcgaaaataaaggcgtagcggcattcgctggcttcatcggttatgcggtaatgaacctcgcggtaaacttctggttgaccaataaaggcattctgccaaccacggatgccgcggttctgaaagccaataacatccagagcattcttgggatccagtcgatcgataccgggatcctcggtgcggtgatcgccggtattatcgtctggatgctgcatgagcgtttccataatatccgcctgccggatgcgctggcattcttcggcggtacgcgcttcgtaccaattatctcctcgctggtgatgggccttgtcggcctggtgattccattagtctggccgattttcgccatgggtattagcggcttgggccatatgataaacagcgcgggtgatttcggaccgatgctgtttggtaccggtgaacgtctgctgttgccgtttggtctgcatcacattctggtggcattaattcgctttaccgacgcaggcggcacgcaggaagtctgcggtcaaaccgtcagcggcgcactgaccatcttccaggcgcaattgagttgcccgaccactcacggtttttctgaaagcgccacgcgtttcctttcgcaaggtaaaatgcctgcgtttctcggcggtctgccaggtgcagcgttagctatgtatcactgcgcgcgcccggaaaatcgccataaaattaaaggtctgctgatttctggcctgatcgcctgcgtcgttggcggcactaccgaaccgctggaattcctgttcctgttcgtagcgccagttctgtatgtcatccacgcgctgttaaccggcctcggcttcaccgtcatgtctgtgctcggcgtcaccatcggtaataccgacggcaatatcatcgacttcgtggtgttcggtattttgcatggtctgtcaaccaagtggtacatggtgccagtggtggcggcaatctggtttgtcgtttactacgtcatcttccgtttcgctatcacccgcttcaatctgaaaaccccggggcgcgatagcgaagttgccagctcaatcgaaaaagccgttgccggtgcgccgggtaaatcaggttacaacgttcctgcaatcctcgaagcattaggcggtgccgacaatattgtcagcctcgataactgcattacccgtctgcgtttgtctgtgaaagatatgtcgcttgttaatgtgcaggcactgaaggacaatcgggcaattggcgtagtacaacttaatcaacataacctgcaggttgttatcgggccacaagttcagtcagtaaaagatgaaatggccggtctgatgcatactgtccaggcataaggataagatatgttcgatttttcaaaggtcgtggatcgtcatggcacatggtgtacacagtgggattatgtcgctgaccgtttcggcactgctgacctgttaccgttcacgatttcagacatggattttgccactgccccctgcattatcgaggcgctgaatcagcgcctgatgcacggcgtatttggctacagccgctggaaaaacgatgagtttctcgcggctattgcccactggttttccacccagcattacaccgccatcgattctcagacggtggtgtatggcccttctgtcatctatatggtttcagaactgattcgtcagtggtctgaaacaggtgaaggcgtggtgatccacacacccgcctatgacgcattttacaaggccattgaaggtaaccagcgcacagtaatgcccgttgctttagagaagcaggctgatggttggttttgcgatatgggcaagttggaagccgtgttggcgaaaccagaatgtaaaattatgctcctgtgtagcccacagaatcctaccgggaaagtgtggacgtgcgatgagctggagatcatggctgacctgtgcgagcgtcatggtgtgcgggttatttccgatgaaatccatatggatatggtttggggcgagcagccgcatattccctggagtaatgtggctcgcggagactgggcgttgctaacgtcgggctcgaaaagtttcaatattcccgccctgaccggtgcttacgggattatagaaaatagcagtagccgcgatgcctatttatcggcactgaaaggccgtgatgggctttcttccccttcggtactggcgttaactgcccatatcgccgcctatcagcaaggcgcgccgtggctggatgccttacgcatctatctgaaagataacctgacgtatatcgcagataaaatgaacgccgcgtttcctgaactcaactggcagatcccacaatccacttatctggcatggcttgatttacgtccgttgaatattgacgacaacgcgttgcaaaaagcacttatcgaacaagaaaaagtcgcgatcatgccggggtatacctacggtgaagaaggtcgtggttttgtccgtctcaatgccggctgcccacgttcgaaactggaaaaaggtgtggctggattaattaacgccatccgcgctgttcgttaaccccaattgcgcaacgtaaaaaatcgttgcgcaatcgtggatttttaccctgctttgtttttataatggtgcgcacttttatatccagaaaaagagtgcgaccatgattgataccaccctgccattaactgatatccatcgccaccttgatggcaacattcgtccccagaccattcttgaacttggccgccagtataatatctcgcttcctgcacaatccctggaaacactgattccccacgttcaggtcattgccaacgaacccgatctggtgagctttctgaccaaacttgactggggcgttaaagttctcgcctctcttgatgcctgtcgccgcgtggcatttgaaaacattgaagatgcagcccgtcacggcctgcactatgtcgagctgcgtttttcaccaggctacatggcaatggcacatcagctgcctgtagcgggtgttgtcgaagcggtgatcgatggcgtacgtgaaggttgccgcacctttggtgtgcaggcgaagcttatcggcattatgagccggaccttcggcgaagccgcctgtcagcaagagctggaggcctttttagcccaccgtgaccagattaccgcacttgatttagccggtgatgaacttggtttcccgggaagtctgttcctttctcacttcaaccgcgcgcgtgatgcgggctggcatattaccgtccatgcaggcgaagctgccgggccggaaagcatctggcaggcgattcgtgaactgggtgcggagcgtattggacatggcgtaaaagccattgaagatcgggcgctgatggattttctcgccgagcaacaaattggtattgaatcctgtctgacctccaatattcagaccagcaccgtagcagagctggctgcacatccgctgaaaacgttccttgagcatggcattcgtgccagcattaacactgacgatcccggcgtacagggagtggatatcattcacgaatataccgttgccgcgccagctgctgggttatcccgcgagcaaatccgccaggcacagattaatggtctggaaatggctttcctcagcgctgaggaaaaacgcgcactgcgagaaaaagtcgccgcgaagtaacaaaatggatggtgcaaatgcaccatccatttttcatgcaaggcacaaagtcgcgcgatgtttggcggattcgatgcccagctcaatcaactccattacctggattgcctggcttgccggaaccggattttcaccatcgccatttaacgcatcacgaatagccgcatagtaagccggataattcccaggcaccgtcaacagcgtttcttcgacacgttcctcaccttccacgcgggtaagtacgccatcacgcatatcgtagccccagtcttcctgcggtagacgctcgccatttttcagacgttcttcctgtggatcgaggccatatttcacataactgcctcgggatccatgcacgatataccgtgctgactcagcggctgccagcatggtaccgtgtaaaatgactcgccgctgtggataggacaagatggcgtggaaataatcggtcgactgcgctccgggccgtaactgtgccaaatctaccgtcatgctgaccggtaaaccaaaaagcgtaatggcctgatcaagaagatgtggtgctaaatcgtaccagataccgctgcctgggccgccctgttcacgccaacgatcgcgcacctgcggacggaagcggtcaaaatgagactcaaagtaagcaacttcacccagcacgccttccgcgagtaaaccttttagcgtcaagaaatcgctatcccagcgacggttatggaatacagacagcacacgccccaggctttttgccagcgcatccagctctcgcgcttgtgacagtgtcacggtaaagggtttatcaacgaccacatgtttacccgcctcaagcgccgctttggctaacgggaaatgggtatcgttgggtgtaggaatgacaatcaggtctatgttgggatcgttaaacagatgcttcggctcagagacaaccgtaaccgttggccagtcggcttttacttttgtttcatcactgctggagattaccgccagttcctgcccgggcgtgcccgcaatcaggggcgcatggaaggttttgctcgcataaccatacccaatcaacccaacacggatgttgtcgctcatgtcattgcctctcattgaagtatgatggctatttgacactatcctttacccacgctcaacagtttaataacctgccagcaataagggatgttgtttaacttaagtcaaaaaaatagcgaattttccaacgacaaaagctaaatatcgcaaaaacctcagtaaaaatcttgctggagctattattgctaagtaacatttaccccctgaagttaatggatcaatcaagagagatgtgggctgtaatgaatcgtcttattgaattaacaggttggatcgttcttgtcgtttcagtcattcttcttggcgtggcgagtcacattgacaactatcagccacctgaacagagtgcttcggtacaacacaagtaagctctgcacttgtggagcgacatgctgcccgtccgggtgcatgttttcacttgtcggatattaaaccaggaatttattatcttgttcgatgttgttggtgattgtcagggatagtaaagcgcgttactcttttcagagcagtttttcatccctgaatatttgccatcagcgcattcttattattgtaataacacaagcgttcacttttggtgaaattttatcatcactaataatacctacccctttggtattaattattttatggaccttttatgactgttcaggactacttattaaaatttcgcaaaatcagttcactcgaaagtctggaaaaactctacgaccatcttaattacaccctgacggacgatcaggaactgatcaatatgtatcgtgctgccgatcaccgtcgcgcagagctggtttctggcgggcgtttgtttgacctcggccaggtaccgaagtccgtctggcactatgtccaataaagaaagtagcgatcggttataaaagccttataataacgcccctaaaattagatttgcctgtttgcgtcgctattctggagaacctatgaccaccacaacgccacaacgtattggaggctggttgcttggcccgttggcctggcttttagtcgctctgttgagtacgacgctggcgttgttgctgtataccgctgcgttatcttctccgcaaacatttcaaacgctcggcggacaagcactgacgacacaaatcttatggggcgtttcttttattaccgctatcgccttgtggtattacacactgtggttgaccattgctttctttaaacgtcggcgttgtgttcctaaacactatattatctggctgcttatttccgtattgctggcagtaaaagcattcgctttttcacccgtggaagatggcatagccgttcgccagttgctgtttactttgttggcaaccgcattgatcgtcccctatttcaaacgctcgtcgcgggtaaaagcgacgtttgtgaatccgtaataaccttacagttaacctgttgtcgcctgctctggattaacggataataggcggcttttttatttcaggccgaaaaatgactgactacctgttactgtttgtcggaactgtactggtcaataactttgtactggtcaagtttctcggtctctgtccgtttatgggggtttccaaaaaactggaaaccgcgatgggcatggggctggcaacaacgtttgtgatgacgctggcgtctatttgcgcctggcttatcgatacgtggattttgatcccacttaatctgatttacctgcgcaccctggcatttattctggtgattgctgtggtcgtgcagttcaccgagatggtggtgcgcaaaaccagcccggtgctttaccgtctgctggggatttttttgccgcttatcaccaccaactgtgcagtgctcggcgtggcgttgctgaatatcaatctcgggcacaatttcttgcagtcggcgctgtacggtttttccgccgctgtcggtttctcgctggtgatggtgctcttcgccgccatccgcgaacgccttgctgtggctgatgtcccggcaccttttcgcggtaatgccattgcgttaattaccgcaggtcttatgtctctggcctttatgggctttagtggtttggtgaagttgtaatgaatgctatctggattgccgttgccgccgtgagcctgctgggcctggcgtttggcgccattctgggttatgcctcccgccgttttgcggtggaagacgatccggtcgttgagaaaattgacgaaatcttaccgcagagccagtgtggtcagtgcggttatcccggctgtcgcccctacgcggaagccatcagctgtaacggtgaaaaaatcaaccgttgcgccccaggtggcgaagctgtgatgctaaaaattgccgagttgcttaatgtcgagccgcagccgctggatggcgaagcgcaagagataacgcctgcgcggatggtggcggttattgatgaaaataactgtattggctgcactaaatgtattcaggcgtgtccggtagacgccatcgttggcgctacccgtgccatgcatacggtaatgagtgatctctgtacgggctgcaatttatgtgttgatccgtgcccgacgcactgcatctcgttgcaaccggtcgcagaaacacctgactcctggaaatgggatctgaacaccattcccgtgcgtatcattcccgtggaacaccatgcttaagttattctctgcattcagaaaaaataaaatctgggatttcaacggcggcatccatccaccggagatgaaaacccagtccaacggtacacccctgcgccaggtacccctggcgcagcgttttgttattccactgaaacagcatattggcgctgaaggtgagttgtgcgttagcgtcggcgataaagtattgcgcggccagccgcttacccgtggtcgcggcaaaatgctgcctgttcacgcgcccacctcgggtaccgttacggctattgcgccccactctacggctcatccttcagctttagctgaattaagcgtgattattgatgccgatggtgaagactgctggatcccgcgcgacggctgggccgattatcgcactcgcagtcgcgaagagttaatcgagcgcatacatcagtttggtgttgccgggctgggcggtgcaggattcccgacaggcgttaaattgcagggtggcggagataagattgaaacgttgattatcaacgcggctgagtgcgagccgtacattaccgccgatgaccgtttgatgcaggattgcgcggctcaggtcgtagagggtattcgcattcttgcgcatattctgcagccacgcgaaattcttatcggcattgaagataacaaaccgcaggcgatttccatgctgcgcgcggtgctggcggactctaacgatatttctctgcgggtgattccaaccaaatatccttctggcggtgctaaacaattaacctacattctgaccgggaagcaggttccacatggcgggcgttcatccgatatcggcgtattaatgcaaaacgtcggcactgcttatgcagtgaaacgtgccgttattgatggcgagccgattaccgagcgtgttgtaaccctgactggcgaagcaatcgctcgcccgggcaacgtctgggcacggctggggacgccagtgcgtcatttattgaatgatgccggattctgcccctctgccgatcaaatggtgattatgggtggcccgctaatgggctttaccttgccatggctggatgtcccggtcgtaaagattaccaactgtctgttggctccctctgccaatgaacttggcgaaccacaggaagaacaaagctgcatccggtgtagcgcctgtgctgacgcctgccctgcggatcttttgccgcaacagttgtactggttcagcaaaggtcagcaacacgataaagctaccacgcataacattgctgattgcattgaatgtggggcttgcgcgtgggtttgcccgagcaatattcccctggtgcaatatttccgtcaggaaaaagctgaaattgcggctattcgtcaggaagaaaagcgcgccgcagaagccaaagcgcgtttcgaagcgcgccaggctcgtctggagcgcgaaaaagcggctcgccttgaacgacataagagcgcagccgttcaacctgcagccaaagataaagatgcgattgctgccgctctggcgcgggtgaaagagaaacaggcccaggctacacagcctattgtgattaaagcgggcgaacgcccggataacagtgcaattattgcagcacgggaagcccgtaaagcgcaagccagagcgaaacaggcagaactgcagcaaactaacgacgcagcaaccgttgctgatccacgtaaaactgccgttgaagcagctatcgcccgcgccaaagcgcgcaagctggaacagcaacaggctaatgcggaaccagaacaacaggtcgatccgcgcaaagccgccgtcgaagccgctattgcccgtgccaaagcgcgcaagctggaacagcaacaggctaatgcggaaccagaagaacaggtcgatccgcgcaaagccgccgtcgaagccgctattgcccgtgccaaagcacgcaagctggaacagcaacaggctaatgccgagccagaacaacaggtcgatccgcgcaaagccgccgtcgaagccgctattgcccgagccaaagcgcgcaaacgggaacagcaaccggctaatgcggagccagaagaacaggttgatccgcgcaaagctgccgtcgaagcggctattgcacgcgccaaagcacgcaagctggaacagcaacaggctaatgcggtaccagaagaacaggttgatccgcgcaaagcggcagttgccgcggctattgcccgcgctcaggccaaaaaagccgcccagcagaaggttgtaaacgaggactaaatggtattcagaatagctagctccccttatacccataaccagcgccagacatcgcgcattatgctgttggtgttgctcgcagccgtgccaggaatcgcagcgcaactgtggttttttggttggggtactctcgttcagatcctgttggcatcggttagtgctctgttagccgaagctctcgtactcaaactacgcaagcagtcggtagccgcaacgttgaaagataactcagcattgctgacaggcttattgctggcggtaagtattccccccctcgcgccatggtggatggtcgtgctgggtacggtgtttgcggtgatcatcgctaaacagttgtatggcggtctgggacaaaacccgtttaatccggcaatgattggttatgtggtcttactgatctccttccccgtgcagatgaccagctggttaccgccacatgaaattgcggtcaacatccctggttttatcgacgccatccaggttatttttagcggtcataccgccagtggtggtgatatgaacacactacgcttaggtattgatggcattagtcaggcgacaccgctggatacatttaaaacctctgtccgtgccggtcattcggttgaacagattatgcaatatccgatctacagcggtattctggcgggcgctggttggcaatgggtaaatctcgcctggctggctggcggcgtatggttgctatggcagaaagcgattcgctggcatattcccctcagcttcttagtaacgctggcgttatgcgcaatgttgggctggttgttctcaccagaaacactggcagcaccgcaaattcatctgctgtctggagcgaccatgctcggcgcattctttattttgactgacccggttaccgcttctacgaccaatcgtggtcgtcttattttcggcgcgcttgcgggcttattagtctggttgatccgcagtttcggcggctatcctgacggcgtggcttttgccgtcctgctggcgaacatcacggttcctctgatcgattactacacgcgtccgcgcgtctacggccatcgcaaagggtaaaccatgctgaaaactatccgaaaacacggcattacgttggcgctatttgcagcgggttcaacagggttaactgcggccatcaaccagatgaccaaaacgacgattgctgaacaggccagtctgcaacaaaaggcgttatttgatcaggtgctgccagccgaacgctataacaatgcgctggcacagagttgctatctggtaactgcgccagagttaggtaaaggtgagcatcgggtttacatcgccaaacaggatgacaaaccggtagccgccgttctggaagcaaccgcgccagatggctattccggtgcgattcagctgctggtgggagccgattttaacggcacggtacttggcacgcgcgtgacagagcaccacgaaacgccagggcttggcgataaaatcgaactgcgcctttctgactggatcacccattttgcgggtaaaaaaatcagtggtgcagatgatgcgcactgggcggtgaagaaagatggtggtgatttcgaccagttcaccggcgcgacgattactccccgcgcggtggttaatgcggtaaaacgcgccggattgtacgctcagacgttaccggcacaactttctcaacttcctgcctgtggagaataaagcgtgagcgaaattaaagacgttattgttcaggggttgtggaaaaacaactctgcgctggtccagttgctcggcctttgtcctctgttggcggtcacgtccactgccactaacgctctgggtttaggacttgcgactacgctggtactgacgctgaccaacctgaccatttcgacgctgcgtcactggacgccagccgagatccgcattcccatttacgtgatgatcatcgcctcggtggtcagcgctgtacagatgctgatcaacgcctacgcctttggcctgtatcaatcattagggatttttattccgctgattgtcactaactgtatcgttgtgggccgcgctgaagccttcgccgccaaaaaaggtccggcgctttcggcactggacggcttttcaattggtatgggcgcaacctgcgccatgttcgtgctgggttcactacgcgaaattatcggcaatggcacattgtttgacggtgcagatgcgctgttaggtagctgggcaaaagtattacgcgtggagattttccacaccgactcccctttcctgctggcgatgctgccaccaggtgcatttattggcctgggactgatgctggcaggaaaatacctgattgatgaaagaatgaaaaagcgccgtgctgaagcagctgcagaacgtgcattgccaaacggtgaaacagggaatgtctgatgaataaagcaaaacgcctggagatcctcactcgcctgcgtgagaacaatcctcatcccaccaccgagcttaatttcagttcgccttttgaattgctgattgccgtactgctttccgctcaggcgaccgatgtcagtgttaataaggcgacggcgaaactctacccggtggcgaatacgcctgcagcgatgcttgaactgggcgttgaaggggtgaaaacctatatcaaaacgattgggctttataacagcaaagcagaaaatatcatcaaaacctgccgtatcttgctggagcagcataatggcgaggttccggaagatcgtgctgcgcttgaagccctgcccggcgtaggtcgtaaaacagccaacgtcgtattaaacactgcattcggctggccgactattgctgtcgacacgcacattttccgcgtttgtaatcgtactcaatttgcgccggggaaaaacgtcgaacaggtagaagaaaagctactgaaagtggttccagcagagtttaaagtcgactgccaccattggttgatcctgcacgggcgttatacctgcattgcccgcaagccccgctgtggctcttgtattattgaagatctttgtgaatacaaagagaaagttgacatctgaagaaaaggggtaacaccgattaccccattgataacctttctttatcctcttttaaaacatctttttaacgtcaatgatgccattgcttagcgttatcatcaggtaatccgtttgcggataaccaaaaatgcaggttaattgtttttttaatagcgaaattttctattcattcgtgatcaagatcacgatgctgtcgcaatgtaaaaacattgcaagaatcaggttaaaatcatttaaatttacacacgcaacaaatattgacctacaaaacattacactggctatttttcagaaactggactatctcactagtaaaaacgctaaatagcagaacatatcgccgttaagccatcacccccctctcagtgcagtgaaaaaatctgccgttacgttttttgaaaaatttaacgctggataacatttcccggaatggttgaattccccgcctcagttatatgtaacagattattacaaaggacttgtctgaaagtgcaagatagtgaacattacctgccgtttcccctcccactataacaattgcgcgtatgttttttatacataacgcgagaaagcacccccgttaatatgggatgtaaaaaaagaggtaaaagtgtccactgcaaaccaaaaaccaactgaaagcgtcagtttgaacgctttcaaacaaccgaaggcgttctatctcatcttctcgattgagttatgggaacgttttggttattacggcctacaaggaattatggctgtttacctggttaaacaactgggtatgtctgaagcggattcaatcacccttttctcttcctttagtgccctggtttatggtctggtcgctatcggcggctggttaggtgacaaggtactgggtactaaacgcgtaattatgctcggcgctattgtgctggcgattggttatgctctggttgcctggtctggtcacgacgccggtatcgtttatatgggtatggcggctattgcggtcggtaacggcctgtttaaagctaacccgtcttctctgctttctacatgctatgagaaaaacgacccgcgtctggacggtgcattcaccatgtactacatgtccgtcaacatcggctctttcttctctatgattgctacgccgtggctggccgcgaaatacggctggagtgttgcgtttgcgttgagcgttgtaggcctgctgatcactatcgttaacttcgccttctgccaacgctgggttaaacagtacggttcaaaaccagacttcgagcctatcaactaccgtaacctgctgctgaccattattggtgttgtggcactgatcgctatcgccacctggctgctgcacaatcaggaagttgcgcgtatggcgctgggcgttgttgccttcggtatcgtggttatcttcggtaaagaagccttcgcgatgaaaggtgctgcgcgtcgtaaaatgatcgttgccttcatcctgatgctcgaagccattatcttcttcgtgctgtacagccagatgccaacgtcactgaacttctttgcgattcgtaacgttgagcactccattctgggtctggccgtagaacctgagcagtatcaggcactgaacccgttctggatcatcatcggtagtccgattctggccgctatctataacaagatgggcgataccctgccgatgccaaccaagtttgcaatcggcatggtgatgtgttctggtgcgttcctgattctgccgctgggtgcgaaattcgcgtctgacgctggtatcgtgtctgtaagctggctggtcgcaagctatggcctgcagagcatcggggaactgatgatctctggtctgggtctggcaatggttgctcaactcgttccgcagcgtctgatgggcttcattatgggtagctggttcctgaccactgccggtgcaaacctgattggtggttatgttgcgggtatgatggctgtgccggataacgttaccgatccgctgatgtcactggaagtctatggtcgcgtattcttgcagattggtgtcgctactgccgttattgcagtactgatgctgctgaccgcgccgaaactgcaccgcatgacgcaggatgacgctgcagacaaagcggcgaaagcagccgtagcgtaaaattcagggaaactcttttacaagccgctaacttttcgttagcggctttttttttgttcagcaacgcactaccatactttaaaccacagacaaaaggagttaccgatgaaattgttctacaaaccgggtgcctgctctctcgcttcccatatcaccctgcgtgagagcggaaaggattttaccctcgtcagtgtggatttaatgaaaaaacgtctcgaaaacggtgacgattactttgccgttaaccctaaggggcaggtgcctgcattgctgctggatgacggtactttgctgacggaaggcgtagcgattatgcagtatcttgccgacagcgtccccgaccgccagttgctggcaccggtaaacagtatttcccgctataaaaccatcgaatggctgaattacatcgccaccgagctgcataaaggtttcacacctctgtttcgccctgatacaccggaagagtacaaaccgacagttcgcgcgcagctggagaagaagctgcaatatgtgaacgaggcactgaaggatgagcactggatctgcgggcaaagatttacaattgctgatgcctatctgtttacggttctgcgctgggcatacgcggtgaaactgaatctggaagggttagagcacattgcagcatttatgcaacgtatggctgaacgtccggaagtacaagacgcgctgtcagcggaaggcttaaagtaatagccatcggcccacaggtcgttgtgggccgaaatgagatatttcagagctttgttgcgctgaagtaatgttctggtttggcaatacgatcctgagcagccaccacttgcagctcatattcctgcattgctttggtggtcaccatgatttcgtagactgcagcggtcacatgttccagcgcctcctgcagcgttgccccctgaagcagtttcaccagcagtaaaccgctcgtcacatcaccaacacctaccggctggcgcataccaaaatccaccagcggacggctgatatgccaggcttcatcggcggtgaccagcagcatttcaaaacggtcacggctgtagccagctcgcgccaggtgtttaaccaacacaatttgtggcccttgcgcaatgagttcgcgcgctgccagaaccgcttcttcgacgttatttaccgcatgctcacagagtatttccagctcaaccagatttggcgcaatgatatcgctggcaggcaaaccgtgccgcacatgaaactctgcgacacccggtgcaacgatacagcctttttccggatgacccattaccggatcgcaaaaatatttcgcctgcggattcgcggctttcacctgacggacgataccgaggatatgttcaccctgctccgccgatcccagatagccacttaatacggcatcacaggtgtgtaatttatcaatggcggcaatgccttgcacaatttcggttaaatggctgggcggcatcacgcagccagtccatttgccgtattgggtgtgattagaaaattgaacggtgttcagcggccagacgttcgcgcccaggcggcgcatcggaaactctgccgcactgttacccgcatgaccataaacaacgtgagactggatagcgagaatatttttcatcatgttccctgtataaaaaccagggggagtgatttctcactccccctttccacttaatgcattatttccagcaaatcagacagtaattctttttaccgcgacgcagtaaggtaaaacgaccaaacagacgatcttcttctttaaagaagtattcaggatcggactgtttttcaccgttaatggtgatggcattggaggcgatagttttacgtgcctgaccacgggaaggttgcagttcagaatcgaccagtgcctgcatcaggtctgcgcccttttccatctcaaccatcggtacgccgtcctgcgccagctgttcgaagtccgcttcactcagcgcactcaaagaaccgctgaacaggcattcggtaatacgttttgccgcctgtaaaccttcttcaccgtgaaccagacgagtcacctgctccgccagtacatactgggcgcgcggtgctttaccgctgtttttatcttcttcttccagggcgttgatctcttcaatgctcataaaggtgaagaacttcaggaagcggtaaacgtcggcatccgcagtgttgatccagaactggtagaatttgtacgggctggttttcttcggatccaaccagactgcgccgccttcagttttaccaaatttggtgccatctgctttagtgatcagcggaacggtcaggccaaacacctgattctgatgcagacgacgggtcaggtcgataccagaagtgatgttaccccactggtcagaaccaccaatttgcagcaccacaccgtactgtttgttcagacaggcgaagtcataaccctgcaacaggttgtaggaaaactcagtgaacgaaatcccctgatcttcacggttgagacgctgcttaaccgcttctttgttgatcatctggttaacggagaagtgtttgccaatatcgcgcaggaaggtcagcacattcatattgccgaaccagtcatagttgttcgccgcgatagcagagttttctccacagtcgaaatcgaggaacggggcaacctgcttacggattttgtccacccactcctgaacagtttcttcggtgttcagcttacgctcggcagctttgaagctcgggtcgccaatcagacccgtcgcgccgcctaccagcgcaaccggcttgtggcccgcctgctggaagcgtttcaggcataacaatggaacaagatgccccaaatgcaagctgtcagcggtaggatcgaagccgcaatagagcgcgatcgggccttgcgccagtcgctctgctaacgcttcctcgtccgtcacctgggctaccagcccccgctcttgcaattgtttaatcaagttactgcttgccatcaaaatctccatgtatataacgactgcacctttgccggtacacgacttttcgccagatgcgaaagagacatagaataaagtgccagaatcaggagtaccagcgattaaagcaagatttttgcatcttttcagggtgcaagacgatcaatcttccacgcatcattttcacgctggtacaaaaagcggtcatgcaggcgatgctcaccaccctgccagaactcaatctgttcaaggctgacgcgaaaaccgccccaaaagctcggcaatggcacttcgccctgttgaaacttctgcttcagctccaggaatttactttcaaggataccgcgggcagaaatgcgactggactgcttcgaaacccatgcaccaatctggctatcacgcgggcggctatgaaaatatttcatcacttcgagagtcgaaagtcgttctgctttaccgatcaccatcacctggcgctcaagggtatgccacgggaacagcaggctaacgcgcggattattttcgatttgatgtgctttacggctgccgaggttggtgtaaaacaccatgcctttttcgtcgtaatgtttgagtaaaacgatgcgctgataaggctgaccatgttcatccacggtagcgaccaccatcgcggtagggtccgccagtttggcttcacaagcctgagagagccaacgttcaaaaagggttaatggatcggcgggaagatcgcggcggcgtaacccgcctttggtgtattcacggcgcagatgcgcgatttgctgcaattcgtcgttatcagacatggttttctttacggattgtcagtgggtgacgctattgtgcgccgcccctggaaaaatctcaacgctgtggattttgtaactgacagttattcaagacgatgcggtcgcgtttatagacagtcgcttcatcgcctttcgaccagaaaacatagattccgtcagtgtaacgcgcgccagaggctgaaatgccctgtttgagatgcagtagttgattatcgtaaacaaaactgacctcctggcgcggattattcagtttgaccgtcaacggtttttcatcacactggtattccagcgtatcggtttgcatgcgctcaaccagctgattaaaggcgctacagccggagagaaggaccggcaaaatgataattaacagttttttcatagtcatatcccgaagactttcctggtctggagggcaatacgccctccctaacgttccaagtgtaacggcagacgcggtaagaaaaattcagttaactctgatatcacgggttagcggggaaaatagcccccagtaccgtctcctggcttgcgccagtgacggaaggcagatttcctggtaatcccgccagcgtccgccaggcaagccaggcgaaagccaatgcttccatgtcatcgccactaatgccaacggcatcggtggtggtgacttctgtgcctggcagtaatgccgccagacgcgccatgagtagcggattacgactacctccaccacataccatcaatcgttcgcagccaccgctcaacaaaacttgttcagaaatggtcacggcggtgagttctgccagtgtcgcctgcacatctcggggatcaacacccggaaaatggcgcaaatggcgctccagccaaccatagttaaagtattcgcgtccggtgcttttcggtgcaggttgcgagaaatacgggtcgctgagcatattttgcagcagtgggagaataactttacccgcccgtgcccactcggcatctttatcgtaaggtttaccggcctgacgccagatccaggcatccatcagcatgttaccaggaccggtatcgtagcccccaaccggctgcccaggaatgagcagtgacagattggcgatgccgccaatattgagcaccattcgtcgctcggttgggtgagccagcagcgcatgatggaacgcaggtaccagcggtgcgccttgtcctcccaaggcaatatcgcgacggcgaaaatcaccgacaaccgtaattccggtgcgtgccacaatttgattgttatcgccaatctgtaaagtgtgtggtgccacgcccgtcggttcatgccagacggtttgaccgtgacaaccgatcgcaactatatctcttgcctgcagattttgttccttaagcaaggcattgaccgcatcagcaaaaagttgcccgagttgagtatcaagctgtccaaactgcgaaagtgtaagctgctggccctggcaaatatccagtacagcctgtttcagagataccgggatcggccaactcaaacttgccagctgtgcgacccggtgttcatcaattgtcgccaacacaacatcaacaccatcaaggctggtgcctgacataacgccaataaagcggcccgatttcatagttcatcctttttcaatctgacgtttgcgcaccactcaaacataaacttttcgtgaataccatgcggaatgaccgatttttaccgttggtagtaaaacattatcttcaaatcaataatcatcatgaatgttttgtttataattggttgatcctactttcattatgatttgctcatatttggtagaacatgtaaccatggattcacatatgccatatactttgaccatgagggatgcttgcgtggcgtttcatggtgaacaggagatttttcaatgattaaacgcgtattggttgtttcaatggtaggtctgtctcttgtcggttgtgttaataacgacaccctgtcaggggatgtttataccgcttctgaagcgaaacaagtacagaatgtcagctatggcaccatcgttaacgtacgtccggtacagattcagggcggtgatgattccaacgttatcggtgcaattggcggtgctgttcttggtggtttcctggggaatactgttggtggcggaaccgggcgttctctggctactgcagcaggcgctgttgcaggtggcgtagctggtcagggcgtacagagtgcaatgaacaaaacgcagggtgtcgagctggaaattcgtaaagacgatggtaataccatcatggtggtacagaaacaaggcaacactcgtttctctccgggccaacgtgtcgtactggccagcaatggcagtcaggtgaccgtttctccgcgctaaataagtttgcgtgtggtcaggttactgaccacacgcccccttcatttcaccctttggcctgtaactcaatgatattatgctcaagttttgcgatgagcgtaatcagttgctccagttcctctgcggagatgccatgtaatatttccgcgcgggttttgttaataacagcttccatttcgctgatcagcggctctgccttttccgtcagtttaatacgtttagcccgacgatcgctggcacaagtttgacgcgaaattaaccctttttcttccagttggtccagagtacggaccagtgatggctgctcgatgccaatcgcttttgccagttgaatttgcgactggtctggaggtaactgatggatattgtgtaacgtaacccaatgggtttgtgttaactccagcggtttcaggcgatggtctatcagagcacgccatatgcgcaccaaccgtgccagatcagaacctagtggcgattccaatttcatctccttataattagcttgctaagatattatgcggcttttagaatagtgtgcagcaattgtattgctaaaacaaatgtattgctgcatttggttaccgtcagacatatttttcagaaattgcgcgtaaatttttcgcacttaaagaatatttattaatctaacgcaatatattcggtcgtaaaggaatctactttgtgaagtttatgctcaatgcaacaggattgcccttacaagatctggtgttcggtgcgtccgtctactttcctccgtttttcaaagcattcgcgtttggattcgtcatctggcttgtcgtacaccgcctgcttcgtggctggatctacgccggtgacatctggcatcccttgttaatggatttatcgctgtttgcgatttgcgtttgccttgctctggcaatactgattgcgtggtaactatgtcaattaaaacaattaagtatttctcaacaatcattgtagcggtagttgcggttcttgccggatggtggctgtggaattattacatgcaatctccgtggacacgcgacgggaaaatacgcgcagaacaggtttctatcaccccacaggtgtcgggacgtattgttgagctgaatataaaagacaaccagctggttaacgcgggggatcttctgctcacgatcgataaaacgccctttcagatcgccgagctgaacgcacaggctcagctggcgaaagcgcaatctgacctcgcaaaagccaataacgaagcgaatcgtcgtcgtcatctctcacaaaattttatttctgccgaagaactcgataccgctaacctcaatgttaaagcgatgcaggccagtgttgatgccgcacaggcgacgctgaaacaggcacaatggcaactggcgcaaacggaaattcgcgccccggtgagtggatgggtgactaaccttactacccgcatcggcgattacgctgataccgggaaaccgctgtttgcccttgtcgacagccactcgttttacgtcattggttattttgaagaaaccaagttgcgccatatccgcgaaggtgcaccagcacaaattaccctctatagtgataacaaaacgttacagggtcacgtttccagtatcggtcgggcgatttatgatcagagcgttgaaagtgactcaagccttattccggatgttaaacctaacgtcccctgggttcgactcgcccaacgcgttcccgtccgctttgcgctggataaagtcccaggcgatgtcacgttggtgtcgggcaccacctgtagcattgccgtaggtcaataatgaacgcatcgtcatggtccttgcgcaatttgccctggttcagggccacgctggcgcaatggcgttatgcgttacgcaataccattgccatgtgtctggcgctgacggttgcctattatttaaatctggatgaaccctattgggcgatgacctcggctgcagtggttagctttcccaccgttggcggtgttatcagcaaaagcctcggacgcatcgctggcagtttgctcggagccattgcggcactgcttcttgccgggcatacgctcaatgagccgtggttttttctattgagcatgtcggcgtggcttggcttttgtacctgggcctgtgcgcacttcacgaataacgtcgcgtatgcatttcaactggcgggctacacggctgccatcatcgcctttccgatggttaatattactgaggccagccagctgtgggatatcgctcaggcgcgcgtttgcgaggtaatagtcggtattttgtgcggcggcatgatgatgatgatcctgccgagcagttccgatgctactgcccttttaaccgcattgaaaaacatgcacgcccgattactggaacatgccagtttactctggcagcctgaaacaaccgatgccattcgtgcagcacatgaaggggtgattgggcagatactgaccatgaatttgctgcgtatccaggctttctggagccactatcgttttcgccagcaaaacgcgcgccttaatgcgctgctccaccagcaattacgtatgaccagtgtcatctccagcctgcgacgtatgttgctcaactggccctcaccgccaggtgccacacgagaaattctcgaacagttgctgacggcgctcgccagttcgcaaacagatgtttacaccgtcgcacgtattatcgccccgctacgcccgaccaacgtcgccgactatcggcacgtcgccttctggcagcgactacgttatttttgccgcctttatctgcaaagtagtcaggaattacatcgtctgcaaagcggtgtagatgatcataccagactcccacggacatccggcctggctcgtcataccgataacgccgaagctatgtggagcgggctgcgtacattttgtacgttgatgatgattggcgcatggagtattgcttcgcaatgggatgccggtgccaatgcattaacgctggcagcaattagctgcgtactctactccgccgtcgcagcaccgtttaagtcgttgtcacttctgatgcgcacgctggtgttactttcgctattcagctttgtggtcaaatttggtctgatggtccagattagcgatctgtggcaatttttactgtttctctttccactgctggcgacaatgcagcttcttaaattgcagatgccaaaatttgccgcattgtgggggcaactgattgtttttatgggttcttttatcgctgtcactaatcccccggtgtatgattttgctgattttcttaacgataatctggcaaaaatcgttggcgtcgcgttggcgtggttagcgttcgccattctgcgtccaggatcggatgctcgtaaaagccgccgccatattcgcgcgctgcgccgggattttgtcgatcagctaagccgccatccaacactgagtgaaagcgaatttgaatcgctcacttatcatcacgtcagtcagttgagtaacagccaggatgcgctggctcgccgttggttattacgctggggtgtagtgctgctgaactgttctcatgttgtctggcaattgcgcgactgggaatcgcgttccgatccgttatcgcgagtacgggataactgtatttcactgttgcggggagtgatgagtgagcgtggcgttcagcaaaaatcactggcggccacacttgaagaattacagcggatttgcgacagccttgcccgtcatcatcaacctgccgcccgtgagctggcggcaattgtctggcggctgtactgctcgctttcgcaacttgagcaagcaccaccgcaaggtacgctggcctcttaattacttaattacaccacaggcatagcgttcaccgccaccgcccagcggtttaggttgatcggacatattatcgccgccaacgtggaccatcagcgctttgtctttgatttcatccagtgatttcagacgaggcgcgatgacggcatcggtagctttgccgtcattattgacgaccagtgcaggcagatcgcctaaatgcccggcaccttctggcccttcatgtttaccggtattttgtggatcaagatgcccgcctgcggattccgcggcgctggctttgccatctttggtggctggctggcagcttcctttggcatgaatatggaagccatgttcaccggggggtaatgctttcagatcgggcgaaaactccagacctttatcggtttcagtaatggtgacgctaccaattgactgccctaccccttgcgacgtgacgaggttcatctcgactttttcactggcagcttgtgcgccggttgcaacaaccagcgccagaatagccagactaaaacgtttcataggacctccgttcattgtgcattcctgaataagtgtaaaccagtgacacatttttgaacggcggctattcctaaaagtgcttacggtacgtcgtaccccagtgccgctttacggatacgaaaccattgttgacgggtcattttcagtgtttctgcttcgacagctgcccgtacgcgctcaattttacctgaaccgataattggcagcggctgcgatggtaaacgtaatacccaggcgtaaaccacctgttcaatcgagcccgcgtttaactcctctgccaccacagccagttcatcacgcagcggctggaaataatcatcattaaacagacgaccaccaccaaggcaggaccacgccatcggacgaacacgcagttgttgtagttggtcgagcgtgccatccagcagtaacggctgatgcaccggggatatttccacctgattagtggcaagggtaaacggcagacgtgattgcaacagggcaaattgcgcaggcgtaaagttcgatacgccaaaatgacgcactttgccgctctgatgcagatgtttgaacgcgtccgccacttcatcggcatccattaacgggtctggtcggtggattaacagcaaatccagatgatcggtcgcgagattaattagcgactgttcggcgctcttaatgatgtgatcgcggtcagtgatgtaatgaccaatgacgttttcttcacgcgcggtcgtcgcgataccgcatttactgacgatttccatccgttcacgcaggtgaggtgccagtttcagtgcctcgccaaacgccgcttcgcactgatagccaccataaatatcagcatggtccacggtggtcacgccgagatccagatgctcttcaataaaactgaccagctggcgggcggacatattccagtccatcaatcgccagtagcccatcacaaaacgggaaaactccgggccttgcggcgcaatagtaatacgctgaaccataatcgcttcctcttatcagatatgagaggagtatacgcaagattaggttcaaaagagtgatggttgctccggttcgtctgatgacgctggcttatttgcgcgtaatttgcgcattaatcgctgccgacaaaggcgcagcacctcttgtttttcgccatcgctcattttattccagttaaaacgctcatcacgactacgaaaacagccgcgacaaaacccgcgttcgtcagactggcaaattccccggcacgggctctggacgggaaagaactctaattgctccgccacttcgccctcctcagataagattattaccattattgaagctgttaatgtccaaagtagcaactttgcttgcactagaccgactggtctactacactccaacgcatgaacaaacacaccgaacatgatactcgcgaacatctcctggcgacgggcgagcaactttgcctgcaacgtggattcaccgggatggggctaagcgaattactaaaaaccgctgaagtgccgaaagggtccttctatcactactttcgctctaaagaagcgtttggcgttgccatgcttgagcgtcattacgccgcatatcaccagcgactgactgagttgctgcaatccggcgaaggtaactaccgcgaccgcatactggcttattaccagcaaacactgaaccagttttgccaacatggaaccatcagtggttgcctgacagtaaaactctctgccgaagtgtgcgatctgtcagaagatatgcgcagcgcgatggataaaggtgctcgcggcgtgatcgccctgctctctcaggcgctggaaaatggccgtgagaaccattgtttaaccttttgtggcgaaccgctgcaacaggcacaagtgctttacgcactgtggcttggcgcgaatctgcaggccaaaatttcgcgcagtttcgagccactggaaaacgcgctggcccatgtaaaaaacattattgcgacgcctgccgtttagcaggcattttttatcaccagacgaccgggagcctttatgtcatctgaaaaactgtattccccactgaaagtgggcgcgatcacggcggcaaaccgtatttttatggcaccgctgacgcgtctgcgcagtattgaaccgggtgacattcctaccccgttgatggcggaatactatcgccaacgtgccagtgccggtttgattattagtgaagccacgcaaatttctgcccaggcaaaaggatatgcaggtgcgcctggcatccatagtccggagcaaattgccgcatggaaaaaaatcaccgctggcgttcatgctgaaaatggtcatatggccgtgcagctgtggcacaccggacgcatttctcacgccagcctgcaacctggcggtcaggcaccggtagcgccttcagcacttagcgcgggaacacgtacttctctgcgcgatgaaaatggtcaggcgatccgtgttgaaacatccatgccgcgtgcgcttgaactggaagagattccaggtatcgtcaatgatttccgtcaggccattgctaacgcgcgtgaagccggttttgatctggtagagctccactctgctcacggttatttgctgcatcagttcctttctccttcttcaaaccatcgtaccgatcagtacggcggcagcgtggaaaatcgcgcacgtttggtactggaagtggtcgatgccgggattgaagaatggggtgccgatcgcattggcattcgcgtttcaccaatcggtactttccagaacacagataacggcccgaatgaagaagccgatgcactgtatctgattgaacaactgggtaaacgcggcattgcttatctgcatatgtcagaaccagattgggcggggggtgaaccgtatactgatgcgttccgcgaaaaagtacgcgcccgtttccacggtccgattatcggcgcaggtgcatacacagtagaaaaagctgaaacgctgatcggcaaagggttaattgatgcggtggcatttggtcgtgactggattgcgaacccggatctggtcgcccgcttgcagcgcaaagctgagcttaacccacagcgtgccgaaagtttctacggtggcggcgcggaaggctataccgattacccgacgttgtaatccaacattgcgagcggcgtaaagccgccgctatactaaaacaacattttgaatctgttagccattttgaggataaaaagatgcgtcttcttcataccatgctgcgcgttggcgatttgcaacgctccatcgatttttataccaaagtgctgggcatgaaactgctgcgtaccagcgaaaacccggaatacaaatactcactggcgtttgttggctacggcccggaaaccgaagaagcggtgattgaactgacctacaactggggcgtggataaatacgaactcggcactgcttatggtcacatcgcgcttagcgtagataacgccgctgaagcgtgcgaaaaaatccgtcaaaacgggggtaacgtgacccgtgaagcgggtccggtaaaaggcggtactacggttatcgcgtttgtggaagatccggacggttacaaaattgagttaatcgaagagaaagacgccggtcgcggtctgggcaactaatctcctgccgggcgtgaactcatcgcgcccgcatctttactgcatcgacaagtaatatttgtcataatgcgcgctgcaatttatccgtattaagagaatcagatgtccgataacgctcaacttaccggtctgtgcgaccgttttcgtggtttttatcctgttgtgatcgatgttgaaacagccggatttaacgccaaaaccgatgcgctgcttgagattgccgccatcaccctgaaaatggatgaacaaggctggctgatgccggacaccacattacatttccacgtcgaaccatttgtcggcgcaaatttgcaaccagaagccctcgccttcaacggcattgacccgaacgatcccgatcgcggcgcggtcagcgaatacgaggcgctgcacgaaatttttaaagttgtacgtaaaggtattaaagcgagcggctgtaaccgcgccattatggtggcgcacaatgccaattttgatcacagctttatgatggccgccgcagaacgcgcctcactgaaacgtaacccgttccaccctttcgccacttttgacactgctgcactggccgggctggcactcggacaaaccgtattgtcaaaggcttgccagaccgctggcatggacttcgacagcacccaggcgcactccgcgctgtacgacaccgaacgcactgctgtgctgttttgtgaaatcgtcaaccgctggaaacgtctgggaggctggccgctatctgccgccgaagaggtgtaatcgagtcgatgcctgatgacatgcaatgattcaggcatctatagtgaggctattccacgcatcctgcatgatattcacggggaatagcgttaatggcagataatccagacccttcatcgctcctgccggacgtgttttcaccggcgacccgcgactggtttcttcgcgcctttaaacagccgaccgctgtccagccgcaaacctggcatgtggcggcgcgaagcgaacatgcgctggtgattgcaccgaccggctccgggaaaacgctggcagcatttctctacgccctcgatcggctcttccgcgaaggcggcgaagatacccgcgaggcgcataagcgtaaaacctcacgcatcctctatatttcaccgataaaagccctgggcaccgacgttcagcgcaacttgcagatcccgttgaagggtattgccgatgaacggcggcggcgcggcgaaacggaagtcaatcttcgcgtagggatccgtactggcgatacgcctgcacaggaacgcagcaaactcacccgtaatccgccggatattctgatcaccacacccgaatcactctatctgatgctgacctcccgcgcgcgcgaaacgctacgcggcgtcgaaacggtaattattgatgaagtccacgcggtagcgggcagtaaacgtggtgcgcatctggcgttaagtctggagcggctcgatgcgctgctccacacctcagcacagcgaattggcctttctgccactgtgcgctcagccagcgatgtggcagcatttcttggtggcgatcgcccggttacggtagtcaacccgcccgcaatgcgccatccgcagatacgaattgtcgtaccggtcgccaatatggatgatgtctcatcggtcgccagcggcaccggcgaagacagccatgccggccgggaaggctccatctggccatatattgaaacgggtatccttgatgaagtgttgcgccatcgctcgaccattgtctttactaattcgcgggggctggcggaaaaactgacggcacgattaaatgagctttacgccgcacgcttacagcgttccccgtctatcgccgttgatgcggcccatttcgagtcgacctccggcgcaacctctaaccgtgtacaaagtagcgacgtttttattgcccgctcacaccacggctccgtctctaaagaacaacgagcaatcaccgaacaggcgctgaaatcgggtgaattacgctgcgtggtcgcaacctccagtcttgaactggggattgatatgggcgcggtggatctggtgattcaggtggcaacgccgctttctgttgccagtgggttacaacgcattggtcgcgccggacatcaggttggcggtgtatctaaagggctgtttttcccccgtacccggcgtgatttagtcgattccgcagtcattgtagagtgtatgttcgcaggcaggctggaaaacctgacaccaccgcataatcctctcgacgtccttgcgcagcaaaccgttgccgccgcggcgatggatgcattacaggtagacgaatggtactcccgcgtacgccgtgccgcaccgtggaaagatctgccaagacgtgtttttgacgccacgctggatatgctttccgggcgctatccctctggcgatttttctgcttttcgccccaaactggtctggaacagggagaccgggatattgaccgcccgacctggcgctcaattgttggcggttaccagcggcggcaccattccggatcgtggcatgtatagcgtgttattacccgaaggtgaagaaaaggccggttcgcggcgggtgggtgaactggatgaggagatggtatatgagtcgcgggtgaacgacattatcactctcggcgctacctcatggcggatccagcaaatcacccgcgatcaggtgattgtgactcctgctccgggtcgttctgcccggctccccttctggcgtggtgaaggtaacggacgtccggctgaattaggcgagatgatcggcgattttcttcatttgctggcggatggcgcgttcttttccgggactattcccccgtggctggcagaagaaaatacgatcgccaatattcaggggttgattgaggagcagcgcaacgcgacgggcatcgttccggggagtcgccatctggtcctcgaacggtgccgtgatgaaattggtgactggcgtattattttgcactctccctatggaagacgggtgcatgaaccctgggcggtggcgattgccgggcgaatacatgcgctatggggcgctgacgcgtcggtggtcgccagtgatgacggcattgttgcacgtattcctgacaccgatggtaaattgcccgatgccgcgatttttttgtttgaaccagaaaagttgctgcaaattgtccgcgaggcggtaggcagctcggcacttttcgccgcccgttttcgcgaatgcgccgcgcgggcattattaatgccggggcgcactccgggccatcgcaccccgctttggcaacaacggctgcgcgccagtcagttgctggaaatcgctcagggatatccggattttccggtcattctcgaaaccctacgcgaatgtctgcaagatgtttatgatcttcccgcactggaacgtttgatgcgtcgcctgaacggtggcgaaattcaaatatccgatgtaacgaccactacgccctcgcctttcgccacaagtttattgttcggctatgtcgcggaatttatgtaccagagcgacgccccgctggcagagcgccgggcatccgtactgtcgctggacagcgagttactgcgcaatctactcggacaggtcgatccgggggaattactcgacccgcaggtcattcgccaggtggaagaagagttgcaacgactggctcctggcagaagagcgaaaggtgaagaaggattgttcgacctgctgcgcgaactggggccaatgaccgttgaagacctggcgcaacggcatacaggcagcagtgaagaggttgcgtcgtatctggaaaatcttcttgcagtaaaacgaatcttcccagcgatgattagcggacaggagcgtcttgcctgtatggatgatgccgccaggctgcgtgatgccctcggcgtacgactaccagagtcattgccagagatttatttacatagagtcagttacccgcttcgcgacctctttctgcgctatctccgggctcatgctctggtcacggctgaacaactggctcatgagtttagtctcggtattgccattgtcgaagagcagcttcagcaactgcgtgaacagggtctggtgatgaatctgcaacaagacatctgggtgagcgatgaagtatttcgtcgtctgcgtttgcgctcgctgcaagccgccagagaagcgacgcgtcccgttgcagccacgacctatgcgcgattgctgctggaacgtcagggcgtattacccgccaccgatggtagcccggcgctctttgcctcaacatcgccaggcgtttatgagggcgtagatggcgtgatgcgggtgatcgaacagcttgccggagtcggtttacccgcctcactctgggaaagccagatcctgcctgcccgcgtacgcgactattcgtcagaaatgctcgatgaattactggcaaccggtgcggttatctggtcggggcaaaaaaaactgggtgaagatgacggcctggtggcactgcatctacaggaatatgctgcagaatcgttcactcccgccgaagcggatcaggcgaatcgttcggcgctgcaacaagcgatagtcgctgttctggctgacggaggagcctggtttgcacaacaaatcagccaacggatacgcgacaaaatcggcgaatcggttgatctctctgccctgcaagaggcgttatgggcgctggtctggcaaggcgtcatcaccagcgacatttgggcaccgttacgcgccctcacccgcagcagttccaacgcacgcacctcaactcgccgcagtcaccgggctcgtcgtggacgtcctgtctatgcgcaacccgtctcgccgcgggtatcttacaacacaccaaatctggctggacgctggtcgttattgcaggtggagccactaaacgataccgaaaggatgctggcgctggcggaaaatatgctcgaccgctacggcatcatcagtcgtcaggcggtgatagccgaaaatatccctggcgggtttccatcgatgcaaacgctttgtcgaagtatggaagactccgggcgaattatgcgaggtcgttttgtagaaggtctgggtggcgcgcaattcgctgaacgtctgactattgaccgattgcgcgatctggcgacacaagccacgcaaacgcgccactatacaccagtggcgctctctgccaacgatccggctaatgtgtggggaaatcttctgccctggcctgcacatccggcaacgctggttccaacgcgtcgggcgggtgcgctggtggtcgtttctggcggcaaattgttactctatctggcgcaaggtggcaaaaaaatgctggtctggcaggaaaaagaggaattactcgccccagaggttttccacgcgctgactaccgcactgcgtcgcgaaccacggctgcgctttacgctaacagaagtgaatgatctaccggtccggcaaacgccgatgtttacgctgctgcgtgaggcgggattttcaagttcgccacaagggctggattggggatagagaaaggactgacggatgcccgttcgcatccgtcagtattgcaggacggattattccgcgtccggctcttcagacttgtatttagcggcagtttctttgatcagctgctgcagttcgccacgctgatacatttcgatcacgatatcacaaccgccgaccagctcgccgtcaacccacagttgcgggaaggtcggccagttagcatatttcggcagttccgcacgaatgtccggattctgcagaatatcaacataggcaaaacgttcgccacatgcggcaagcgcctggactgcctgggcagagaaaccgcagctcggcagtttcggtgaacctttcatgtacagcaggatcgggttttcagcaatctggcgttggattttttcgatagtggtgctcattgtcttgcttcctcaaacttctttacggcagtaatctgacattgtagcgggtcagtgcggcatcggaaaataacattttcatcacgcttttgctattttatccctttgctctatttgttgcatttcaaatattcgtttcttctctgatgccggcaaactggcgtatttataaccatttttagctttcactgctgcatttttttgcgctcgccaacgaaacgtattttttaacaataaaagctattaactttctcttcttctatgcattagaatcatcaagttttgtaaatcagacgcaggcatgatagacctgcctttacagagggacgctcagtggcgcggataaaccgtatttcgatcacgctctgtgctttactttttaccaccctgcctttaacgcctatggcccatgcttcaaagcaagccagggagagttctgctaccactcatatcaccaaaaaagcagataaaaagaaaagcacggcaaccaccaaaaagacccagaaaacagcgaaaaaagccgccagtaaaagtacgaccaaaagcaaaaccgcttcttccgttaaaaaatcttccattaccgcttctaaaaacgccaaaactcgcagcaaacacgccgtcaataaaacggcctcagccagctttaccgaaaagtgtaccaaacgtaagggctataaatcgcattgtgtgaaagtcaaaaatgccgcgtcaggaactcttgccgacgcgcacaaagcgaaggtgcaaaaagctacgaaagtggcaatgaataaactgatgcagcaaattggtaagccatatcgttggggtggcagctcaccgcgtaccggttttgattgcagcggcctggtttattacgcttataaagatttggtgaaaattcgtattccgcgtacggcgaatgaaatgtatcacctgcgtgatgcagcgccaatcgaacgtagtgaactgaaaaacggcgacctggtctttttccgtactcagggacgcggcacagccgatcatgtcggcgtgtatgtcggcaacggcaaatttattcagtcaccgcgcacaggtcaggaaattcaaatcacttctctcagtgaagactactggcagcgccactatgttggcgctcgtcgggtaatgaccccaaaaacacttcgctaaaactttaccctgttgttacggcaacagggtaagttcatcttttgtctcaccttttaatttgctaccctatccatacgcacaataaggctattgtacgtatgcaaattaataataaaggagagtagcaatgtcattcgaattacctgcactaccatatgctaaagatgctctggcaccgcacatttctgcggaaaccatcgagtatcactacggcaagcaccatcagacttatgtcactaacctgaacaacctgattaaaggtaccgcgtttgaaggtaaatcactggaagagattattcgcagctctgaaggtggcgtattcaacaacgcagctcaggtctggaaccatactttctactggaactgcctggcaccgaacgccggtggcgaaccgactggaaaagtcgctgaagctatcgccgcatcttttggcagctttgccgatttcaaagcgcagtttactgatgcagcgatcaaaaactttggttctggctggacctggctggtgaaaaacagcgatggcaaactggctatcgtttcaacctctaacgcgggtactccgctgaccaccgatgcgactccgctgctgaccgttgatgtctgggaacacgcttattacatcgactatcgcaatgcacgtcctggctatctggagcacttctgggcgctggtgaactgggaattcgtagcgaaaaatctcgctgcataataactgatggcaaatgcagcattgcctgaagcgctacgcttatcaggcctacgcggatcatcgatgtaggtcggataaggcactcgccgcatccggcaagataaatcgcacgttgtcagcaactgtaacgcagaaggttatccttctgcgtttttgtttaattagctgttagcaacgcaaactgtttcaggttgttttctggctgacataaacaccagcaataatgccagtcccgcgacaatcgctcccatcaccggcacaaagctgtatcccagcccagcggaaattaccgcaccaccagcagctgctcccagcgcatttccaagattaaaggcaccaatattgactgatgaagacagacctggcgcttcactggcgacacgcatcacgcgcatctgtaacggcggtacgaccgcaaaggttgctgcgccccacaccaccatgctaatagctgcgccgaactcattgcgggccaggaacgggattgccagcataatcaccatcaacaacaacaaaaagcctttcaacgtgccgttaactgaacgatctgccagtttgccgccgagatagttaccgatagagaatccgacaccaatcagcaccagcattgccgtgacgaacaccggtgttgcgtgggtaatactttgcagtaccggagagatataggtgtagagagtaaacattgcaccagctcccagtaccgtcgtcagcaatgcagacagcacctgcggacgcattaataccgccagctcttttttcacttcaggtcgtgcccctgcaccacctttaggtaatgagaagaacagacttaccattgaaatcactcccagccccgccgttgccagaaatgacatccgccagccgatggtttcacccaaccaggtcgccgccggcacgccaccgatatttgccagggttaaccccataaacatagtggcaactgcgctggcctgtttatgttttggcaccacgcttgcggccacgactgaacccaaaccaaaaaatgctccgtgattcaggctggtcaaaatgcgtgaaagcatcagggtcatataatccggcgcgatggcggaaagtacgttgccgagcgtgaaaattgccatcaggaaaatcaacgcactgcggcgggcacgatgagaaagtagaagcgtcatcagcggcgcgccaaccattacgccaactgcataggcactgattaacattccggcagcgggaatcgagacatccacaccgcgcgcaatgacgggcaacaagcccattggcgagaactccgttgtcccgataccaaacgcgccaatcgccagcgccagcaacggatagttaattttcatgccttatctccacctcttcgcgtcattacgcgatattcattaaagtggcgaaagcatgacagcaatcacaaaaaaatgaaaataacaaaaagagaaaacacttttgccattttgctaacaaacaggaaggagatgcgagggagaacgcgctccctcgagaggaaatcagtgcagcgcggcagtcaaacccacggctacgatcaaaccgaggacgataatcgttgttaccagtgaaaatttaaggtcggtgctcatcaagttttctccttttttattaccacacaaaaagtgatattacgcatttttacacactgtgatgaaaaaatctcccgtcatttataatgataagtgtttttaccacttccccttttcgtcaagatcggccaaaattccacgcttacactatttgcgtactggccattgaccccttcctgacgctccgtgtcgtttttccggcgtaccgcaacacttttgttgtgcgtaaggtgtgtaaaggcaaacgtttaccttgcgattttgcaggagctgaagttagggtctggagtgaaatggaatggcaacaataaaagatgtagcgaaacgagcaaacgtttccactacaactgtgtcacacgtgatcaacaaaacacgtttcgtcgctgaagaaacgcgcaacgccgtgtgggcagcgattaaagaattacactactcccctagcgcggtggcgcgtagcctgaaggttaaccacaccaagtctatcggtttgctggcgaccagcagcgaagcggcctattttgccgagatcattgaagcagttgaaaaaaattgcttccagaaaggttacaccctgattctgggcaatgcgtggaacaatcttgagaaacagcgggcttatctgtcgatgatggcgcaaaaacgcgtcgatggtctgctggtgatgtgttctgagtacccagagccgttgctggcgatgctggaagagtatcgccatatcccaatggtggtcatggactggggtgaagcaaaagctgacttcaccgatgcggtcattgataacgcgttcgaaggcggctacatggccgggcgttatctgattgaacgcggtcaccgcgaaatcggcgtcatccccggcccgctggaacgtaacaccggcgcaggccgccttgccggttttatgaaggcgatggaagaagcgatgatcaaggtgccggaaagctggattgtgcagggtgactttgaacctgaatccggttatcgcgccatgcagcaaatcctgtcgcagccgcatcgccctactgccgtcttctgtggtggcgatatcatggcaatgggcgcactttgtgctgctgatgaaatgggcctgcgcgtcccgcaggatgtttcgctgatcggttatgataacgtgcgcaacgcgcgctattttacgccggcgctgaccacgatccatcagccaaaagattcgctgggtgaaacagcgttcaacatgctgttggatcgtatcgtcaacaaacgtgaagaaccgcagtctattgaagtgcatccgcgcttgattgaacgccgctccgtggctgacggcccgttccgcgactatcgtcgttaatcacccgttgcgggagtctcttccggctcccgcagccactccttattcagcgtctcactatcgccgagatactcaagcaaccaggttaacgcaggcgacatatcattttgctgccatgtcagacaacatgccgaatccggaaaggggttttccagttctaatgctacccacttcccctcattaagccacggtttggcgaaatgtgttggcaccatccctatgcataatcctgccgagatacaggttgccgatgattcccagtcaggcacgacaactcttttttggttatccagcaaccaggtaatacgtttaggtagcgttcgcgaggtgtcttcgcgcaccaacgacggccagttgcgcaacgtatcatcgctgaacgggccatccatcaacgccagcgggtggtgactggcaacaacgcaactccagcttagcatccccatatcccggaaggcataacgaccgcctaccggaatcgcgcgtgttgcgccaatcgccagttccacgcgcccgtcggaaagcgcatcccagacaccgttgaacacttcctgaaagacaagaagttcgacatcatcaaaatggcgataaaaatcaacgatcatctgccgtgtacgttctggcctgacaatattatccactgcgatagctaactgaccgcgccagccgttcgctatctgctgacattgctggcgggtgatctgcatttttttgacaacagagcgcccttctttgagaaaccacgctccagcagcggtcagctccacatcacggtgccgtcgttcaaagagcggcaccgccagccactcttccagctgacgcacggtatagctgaccgcagaaggaacgcgatgcagctcctgtgccgcagcgctaaaactaccattacgcgctaccgcatcaacaacttcgagtgaatattctgaccacatagtctgcctgcaaaatttttgaaaccagtcatcaaatattaccgtttcacaacactaatttcactccctacactttgcggcggtgtttaattgagagatttagagaatatacatgcaacctgggaaaagatttttagtctggctggcgggtttgagcgtactcggttttctggcaaccgatatgtatctgcctgctttcaattaataataagccatacaggccgacctgcaaacgcctgcgtctgctgtcagtgccagccttagtctgttccttgccggttttgccgcagcccagcttctgtgggggccgctctccgaccgttatggtcgtaaaccggtattattaatcggcctgacaatttttgcgttaggtagtctggggatgctgtgggtagaaaacgccgctacgctgctggtattgcgttttgtacaggctgtgggtgtctgcgccgcggcggttatctggcaagcattagtgacagattattatccttcacagaaagttaaccgtatttttgcggccatcatgccgctggtgggtctatctccggcactggctcctctgttaggaagctggctgctggtccatttttcctggcaggcgattttcgccaccctgtttgccattaccgtggtgctgattctgcctattttctggctcaaacccacgacgaaggcccgtaacaatagtcaggatggtctgacctttaccgacctgctacgttctaaaacctatcgcggcaacgtgctgatatacgcagcctgttcagccagtttttttgcatggctgaccggttcaccgttcatccttagtgaaatgggctacagcccggcagttattggtttaagttatgtcccgcaaactatcgcgtttctgattggtggttatggctgtcgcgccgcgctgcagaaatggcaaggcaagcagttattaccgtggttgctggtgctgtttgctgtcagcgtcattgcgacctgggctgcgggcttcattagccatgtgtcgctggtcgaaatcctgatcccattctgtgtgatggcgattgccaatggcgcgatctaccctattgttgtcgcccaggcgctgcgtcccttcccacacgcaactggtcgcgccgcagcgttgcagaacactcttcaactgggtctgtgcttcctcgcaagtctggtagtttcctggctgatcagtatcagcacgccattgctcaccaccaccagcgtgatgttatcaacagtagtgctggtcgcgctgggttacatgatgcaacgttgtgaagaagttggctgccagaatcatggcaatgccgaagtcgctcatagcgaatcacactgatctatatcgatatacttatacttaggctgctaacaaaattttgttgtatgattgaaattagcggcctatactaatttcgagttgttaaagctacgataaatattatgtttttacggggacaggatcgttcccgactcactatggatagtcatttcggcaagggttcctcctttccctctgttctacgtcggattatagactcgcggttttttctgcgagatttctcacaaagcccaaaaagcgtctacgctgttttaaggttctgatcaccgaccagtgatggagaaactatgagttcatcgtgtatagaagaagtcagtgtaccggatgacaactggtaccgtatcgccaacgaattacttagccgtgccggtatagccattaacggttctgccccggcggatattcgtgtgaaaaaccccgatttttttaaacgcgttctgcaagaaggctctttggggttaggcgaaagttatatggatggctggtgggaatgtgaccgactggatatgttttttagcaaagtcttacgcgcaggtctcgagaaccaactcccccatcatttcaaagacacgctgcgtattgccggcgctcgtctcttcaatctgcagagtaaaaaacgtgcctggatagtcggcaaagagcattacgatttgggtaatgacttgttcagccgcatgcttgatcccttcatgcaatattcctgcgcttactggaaagatgccgataatctggaatctgcccagcaggcgaagctcaaaatgatttgtgaaaaattgcagttaaaaccagggatgcgcgtactggatattggctgcggctggggcggactggcacactacatggcatctaattatgacgtaagcgtggtgggcgtcaccatttctgccgaacagcaaaaaatggctcaggaacgctgtgaaggcctggatgtcaccattttgctgcaagattatcgtgacctgaacgaccagtttgatcgtattgtttctgtggggatgttcgagcacgtcggaccgaaaaattacgatacctattttgcggtggtggatcgtaatttgaaaccggaaggcatattcctgctccatactatcggttcgaaaaaaaccgatctgaatgttgatccctggattaataaatatatttttccgaacggttgcctgccctctgtacgccagattgctcagtccagcgaaccccactttgtgatggaagactggcataacttcggtgctgattacgatactacgttgatggcgtggtatgaacgattcctcgccgcatggccagaaattgcggataactatagtgaacgctttaaacgaatgtttacctattatctgaatgcctgtgcaggtgctttccgcgcccgtgatattcagctctggcaggtcgtgttctcacgcggtgttgaaaacggccttcgagtggctcgctaaaggctattctatcgccccctctccgggggcgatttcagatcaggcttctgtgcctggttgattcatggcattttctcgtgccgccagcacacgttctaccgtatctaccactgcctgagtttgtggatcgatttcaatgttgacgcgtgcgccaagttttttcttcccaagagtcgtgcgttccagtgtttccggaattaaatggacgcaaaaacgcgttggcgtgacttcgccgacggtcaggctaataccgtcgatgccaataaatcctttgtacagaatatatttcatcaactgactatcctggactttaaaccagatctggcgattattttctgaggttaatattttcgccacttcagcagtggtcataatatgacctgacattaagtgtccgccaatttcatcactgaatttcgccgcacgctcaacgtttacccaatcccccacttttaaatcgccaagattggtaatgcgtaacgtttctttcatcaggtcaaaactgacatggttgccgttaatttccgtcacggtcaggcagcaaccgttatgcgccacggaagcaccggtttccaggccgtccagcatgtggtcgggtaactccaccacatgcgtacgaaaatttggtttctcgtcaatcgacaccagttttgcggtgccctgtacaatccccgtaaacatacttacaactcctgaaatcagttaagacattctgttcagcacaatagcaggtggaaaacgcccttaccagtgaaggggtaagaatggctattttttcactggagaattaataaatcctcgctacaatagactgaatttcccctgcttcttctttttgctgcccattcaggcggctttttagtctctcatataactacaaataaaaggtgttcacgtgcagaagtatatcagtgaagcgcgtctgttattagcattagcaatcccggtgattctcgcgcaaatcgcccaaactgcgatgggttttgtcgataccgtgatggcgggcggctatagtgccaccgacatgaattaataataaggtacttctatctggcttccggcgatcctctttggtcacggactgctgctggcattaacgccggttatcgcgcaattaaatggttccggtcgacgtgagcgcattgcgcatcaggtgcgacaaggtttctggctggcaggttttgtttccgttctcattatgctggtgctgtggaatgcaggttacattatccgctccatggaaaacatcgatccggctctggcggacaaagccgtgggttatctgcgtgcgttgttgtggggcgcgccgggatatctgttcttccaggttgcccgtaaccagtgtgaaggtctggcaaaaaccaagccgggtatggtaatgggctttatcggcctgctggtgaacatcccggtgaactatatctttatttatggtcatttcggtatgcctgagctcggtggcgttggttgtggcgtggctactgcggcggtgtattgggtcatgttccttgccatggtttcttacattaaacgcgcccgctccatgcgcgatattcgtaacgaaaaaggcaccgcaaaacccgatcctgcggttatgaaacgactgattcaactcggtttgccgattgcgctggcactgttctttgaagtgacactgtttgccgtcgtggctctgttagtgtctccgctcggtattgttgatgtcgcaggacaccagattgccctgaactttagttcactaatgttcgtgcttccaatgtcgctggcggcagcggtaactatccgcgtaggttatcgtctgggtcagggctcaacgctggatgcgcaaaccgctgcgcggaccgggcttatggtgggtgtctgtatggcaaccctgacggccattttcacggtttcactgcgggagcaaatcgccctgttgtacaacgacaatcccgaggttgtaacgctggctgcgcatttgatgttgctggcggcggtatatcagatttctgactcaatccaggtgattggcagtgggattttgcgtggttataaagatacgcgttccattttctatattacctttacggcttactgggtgctgggcttgccaagcggctatattctggcactgaccgatctggtcgttgaacctatggggccagcaggcttctggataggctttattattggcctgacgtcggcagccattatgatgatgttgcgtatgcggttcctgcaacgtctgccgtcagccatcattctgcaacgagcatcccgctaataaagacaaggcgcaaccttcacgggttgcgcctgtatttttacgcaggctggagcgttgcgccaatcccgtcttcgtctggctgtaatttcagagcgttacacagagtttgccgactggcatctgttatctcaacgtgtatatccccggtaacttcccctttcacattgatgaagtcaggtgaaatttcttttgcactggtttgcaggcaaatcgctccctctccgcgcaggcgtttcactttcagttgcacatgcgttgccgcatcagtgatcagccacagttttccaccattcagattgatgttaccaacaatgaaagtgacactgtcaccttttaccgtactgccgtctagaatcaacacaccgccctgctgtacagtaatcgttgattgttgcagctctgcgccataaccaataatcattgaagcgccgtccagtaatgcaacactcccggtcagttcaaccggtgcgcgatcttcctctacgacaaaattttcgtccgcgctggtgggtgacaacaggatcactgtcccaccttgtattaccgcgttttccagcgtaccggcatgcacttcagcccgaccacccacattcacggacaggttttgcgtcttaccggaactgtagagctgaaggccatccgtccccagacgataaatggatccattctcaacaatagtgtcagagtcttcaccaccgagattattcatggtgccaccagcaagcaacgtatcactggctttcccggccagcataaaaacgccgccctgattaatctcacaattgctggcttccccacctggatacaccaacaattcaccaccttcatctaccacgaccgctgaggttgtcccattaaccaacaggccgccctcttgatcgagaatgattttttccgcgcgatgtccttccagtacacgcaggttaccgccattttccagcaacaaaccgcaggcataacctttatcaacgctgaattcaccttcgggatggcggccattaaccgtagcgagcgtagagagactaattgcgcctccctcggactgaacaatatctgtggcaatggcaccatcgctgaccgatagcgtgccattgttaccgtactgtgtgcatttggcgatcccaccggttgccactttcaaccagccagcccccgtgaccacggtattttcggctcttccgccagcttcaacaatcaactcgccttcagtaagttgcgtcgcgccaatgacctcgccggtcttaacaatttgcacgttcccgtcgctcatcaagtttttcgcatcagatcccatgatttattcctttgctgcatctgtgtgcctttattgctacctaagtgtaaaggctacggaggatttatccacgacagatttgagatggtggcaaacaactctgtttaaactctgatacacgaattattgggttgtatcagatgtaaatgcgatcctgaataaaaatcacccttgcaaatcaacaaaatatagccaatttgcttaaaagctctgcaaacggtcgaaatagcgcagaaaattacgttttgcctcttgccaccttcccactctgccgctaatattcgtccccgttgtcacctacaacgttgcgttcatagctcagttggttagagcaccaccttgacatggtgggggtcgttggttcgagtccaattgaacgcaccatcctgcgtccgtagctcagttggttagagcaccaccttgacatggtgggggtcggtggttcgagtccactcggacgcaccagattttcttaatctggtcttctcctttttccctctgtttcttctctgtatccaatacgttaaaagatttacactgtcttcgtatgcgttatcagaaggagaatcgctatggcaactttgttacaacttcattttgcttttaatggcccatttggcgacgcaatggctgagcagcttaaaccacttgctgagtcgattaatcaggaacctggttttctgtggaaggtatggacagaaagtgaaaagaaccacgaagccggtgggatctaccttttcactgatgaaaaaagcgcccttgcctatctggaaaaacatactgcccgactgaaaaatctcggcgttgaggaagttgtcgccaaagttttcgatgtcaatgagccacttagtcaaatcaatcaggcaaaactcgcctgacagaatttaatcaagggcggttagcgcccttttcatccctgtctgaaatttctcaaattctaaaaatctcaaccaaacttatctgataacactaaattcgaaagaatgcgtacaggtaagtaacaatgaaaaaaattgctattgtgggtgccgggcctacggggatctacaccttattctcgcttctacagcaacaaactccactttctatttctatcttcgagcaggctgacgaggccggtgtcgggatgccatacagtgatgaggaaaactcaaaaatgatgctggcaaatattgccagtattgaaataccgccgatttattgtacgtatctcgaatggctacaaaagcaagaagacagccatctccagcgttatggcgttaaaaaagaaaccttgcacgatcgtcagtttttaccgcgaattctgctgggcgaatatttccgcgatcaatttttacgactagtagaccaggcacgacagcaaaaatttgcagtggctgtttatgaatcatgccaggttaccgatctgcaaattacaaatgctggcgtcatgctcgctacaaatcaggatttacccagcgagacgtttgatttagcggtgatcgccacgggtcacgtctggcctgatgaagaagaagcaacccgaacgtattttcccagcccgtggtcaggcctgatggaagcaaaggtcgatgcgtgtaacgtgggtattatgggaacatccttgagcggactggatgcggcaatggcagtggctattcagcatggttcgttcattgaagatgataaacaacacgtcgtttttcaccgcgataacgcaagtgaaaagctaaatatcacgttgttgtcgcgcacgggtattttacccgaagccgatttctattgccctattccctacgagcccttacacatcgtcaccgatcaggcattaaatgctgagattcaaaaaggcgaagagggccttttggatcgggtatttagattgatagtagaggaaatcaagtttgctgatccagactggagtcaacgcatagccttagagagcctgaatgtcgattcctttgctcaagcctggtttgccgagcgcaaacaacgcgacccatttgactgggcagaaaaaaatctccaggaagtcgaacgcaataaacgagaaaaacatactgttccctggcgttatgtcattctgcgcctgcatgaagccgtacaggaaattgttccacatctgaatgaacacgaccataaacggttcagtaaaggccttgcccgggttttcatcgataattatgcggcaatcccttcagagtctattcgtcgcctacttgccttacgtgaagcgggaatcattcatattctcgccctcggtgaagactacaaaatggaaattaatgagtcgcgcaccgtcctgaaaacggaagacaacagctactcgtttgacgtttttattgatgcccgcggacaacgtccgcttaaagtgaaagatatccctttccctgggctacgcgagcaattacagaaaacaggggatgaaatccctgatgttggcgaagattatacgttacagcaacccgaagatattcgtgggcgcgtagcgttcggcgcgttgccctggttgatgcacgaccagcctttcgttcagggacttacggcatgtgcagaaattggtgaggcgatggctcgggcggtcgtaaagcctgcatcccgtgctcgtcggcgtctttcgtttgattaaaggtaaagctatcagcactcaacaaactgatgctgttcattaagacgatagcggactccggctcgaatattgttttcaccttcaatggcgacggcgaagcgaactctttcgccgtcatgatatgccagtgcggcgcttcctcctggcccgagaataattgagtcgaccacgcccgtgctcactaccgttgaattttcaccgctggcaatgatgtgtacattgtcgccgctgttggcaattctggcgtttgcgccaaagctggcgatttgcaccaggtcaccattactggcgacatgacaccgttcacccaatgtacaaacgcgtactcgcattccggtattcgcaatccgactgctatctccagcgctgcttatccgcgaagaattaccggttacagcaacccgtgcgcgttcaccggagctgccaatgtgactgttaaagccgacacttccaatccgcacgctataacccatactggcaatttgcgcggcatacccagcggttgcgattctggcgttatcctcacaacagccgatgcgagcatgatcgtcgctgcgggcaaactgactgcaaaatggtctctctccggggtctgtggccagtttttgcatagaggaaacttcctgatgcgcgaagttttcatccgccagccattttttccacgcatactcaaccagactctccgcccagtccgtatatccttcctcaatcagtgcatgatgaatatcggcataactaccgccgcgtgggaaatggcgcaggaaccagcgatacatcaccgctccgatacgccattctcgcaggtctgcttgtgtaatgatcattcgttagtgccggtgatagccatcgaccatgcttttaaaggtttcgtgtggcgtacgccccgtggtgcaaagataaagatgaccgaagataaaaaagaggcttataaatgccagagcaaaatgtgtctgcaataaccagtatcttacgccaggaaacacatctcccacggcttgcggatagagacacagcagccccgtcaatagtaacaacggcagcaatccatacatgacaccaacataggcgacctgctgtaagggattaaatttagactgggttgttgccgggaaaggatgttcttccccctgcataatgccaaacaaataaaatcgcgtttgttttgccgctcgttccagccacccctgacgacgaatgcgatagtggtgaccattatccccaacggcattgatcagcacaaagccgagccagcatgccagtaacaaaaatccgcaaacttcatgcaccgcaaccagacttttaaccgcagttgcgcccaccatcgcaaagtgatttatcagcccactggccagcaacaatacaaagagtaacgcattcgaccagtgccataatctgaccgctttgctgtaaagataaatcttctcaccatgatcggtggctgatttcttcacgccacgagcacgaagcaaggcatgcagccccagcaccaaccacatcccaaccagcaatactccggcaatgatcaaccacaccggccaaaattcgggagtgaactgtggcacatagttcgctaactggctctgaaactgttcagcatgttgcgacgggttcatacattttcctttttaatcaaatgttgaccgaaccggcgatacagatgcggtttcccggcaccaggtagctgatattgatagtatttattttgctgcaaccacgcctgaatttctgggctatcttcgcgaccaaagatcaatgcgtgttccgggcaggcgctgacgcaaatgggcggaaagccttttgccagtcgggactcagcgcagaaatcacatttatctgccactttagtgacagggttaaggtagcgaacctggtacggacaagcgccaatgcaataactgcagccgatgcactgcgatttttctacccgcacgatcccctgctcatcacgccacgacgcccccgtcgggcaaacgtcgatgcacggagcatcttcgcagtgctgacatgactggcgaaaaaagtgatactgcgtttcgttgtcgttatcggtgactggaatgtgtgctatcgataaacggcttccctgagcggggacgtggttagttttacggcatgcgcgggcgcaaatattacagccattgcaccgtgactcgtcatgaatcatggcataccgaacttccttttcttgcctcgtgttcgctaacagagaagacgcagaaccagtaaaaaagattactgttcccatccccagaacaaatttgcgtcgagtgaaggacatctgattatcccctaatgcagtggctgcaactgtccaccctatccatgacatctccctgaaatttcaggggttctgaaactgctctacctcgaaccattcgcataagccataagccttgccataggtcataaatcgctcgctaaacaagtacaacaccgccgtcgatgactccacctgccgtatatcggcatattcaggtgcaacatccatcgcggcgatcgcggcttcaatctgcgcttcctggaagtaatatggcgcttgcatcagcatggcgactttgtaaggacgaggatacgtctggcactcaaaacgaacggcgtgtgcaatggcgcgacaaatgtcctgctccacaacttgcaaagacatcgccgcgtagttttcactcatggcctgcgttgagtaatagtaatcatccttgcttcccgtcaaacaagcgatatccgcgtagtctccgttctgcttaatgctttccagcaaaactgacagttcctcttctgcaaccaaatagggtggcgagagaaacacggcgcgcgccaccagctgcccagccgcagaatgctggcgaatgaactcagccaggatttcagcaggttctggttcggttaccgtatcaacggggtgacgcatcccctgcaaccattgccgcttcgcctcgtcaacttcgctgactttcgctaacggcaattcatcctgatggttcatcttacccattccttacgcaggcagtagattgtgtgctgccagatcggcggcaatatcttccagccccagacgctgcaatgtttcgcgggttggacaaccaagctgtgggtcccagcccatttctttgtagaacatcgtgagcgaagcatgcatatcgtcacgatccattttgtcagtaccttcagtaaagaccgggatctgcggatccttgtcgaatacccaggaacagataagatcgtgttcattacgcatatctttggtttgcatcagttttaccgtgtaggcacgatgcaacgtaaaaatacgctctgcagctaaatctaatttttcctgagtcatctcttcgccggtgatcgctttgaagaatttggcttcaagcgccagatcgccccggtaattacggcttttcagcggcgaaacggtcattggccagacccagttgcacagggtgacggcgttatgcaaacagacccgcaacagcgaccactttgcatatttaatttttgcgtcattgattggcgtgtagtttttggtttcatcgtaagcatcttcagaaccaaaaagttctttcgccacttcacgttgcagtttcaatggcaagccggaaccaataaagttgatatgggtatgcgtcatgcagtcacggttgaacatacagttaacaatggaaccgacctgcgctgacgcttcattggcatggtgaaccggatagccaaacggcgaccagagtttatttttcgcgtagccccagtactcttcacccaaattccagcgttctgcgatggcatatgaaccatcagccaggtgactcagctcacccacacgatgcgccagacggtagtaaaaatctttaatgaagttaacgtcacccgcttccagttgatcccagcgaatttctgcatactcttcagctggcagaacacgcttgaacacacctttgctgtaacaataagtaaagtcgcgatgcaactgcccgtagttacaccataggccgtagtcatcgaacaaattcagacccaccaggttaccaatcacacgaccatcgtctttatcttcaaaatctttcggcccgttcgggaagatggtggtatggacaaagtttgctacacaagtgttaccacctgtgctgggcacgccaaactctttcacccgaggaatattcatttgggtcatacaacggatcgggcaagagtggcagccgctcatttttactgtgtatttctctgccgccggtcctaagtcaaaaacggatttataggtacgaaagccgaccgtattctgattgcctggcggaatttcacccgtttcaatcggaccaccttcagccgcgccccaaaacagccctttacgtgctgtccagcgtgacttgggatctgaatactctgcccacgattgtggcgtacttggcacgacatggttgttattcgcaccaataagttcagtcatcatgtaatcattgagacgcttcatctcctgacgatcggcaatgttgacccctttcgtcccttcaaccgcaatcgctttcaggtttttcgaacccattattgcgccagttcccgcaccgccgctgtggttacggctattcaacatgccagagagaggaacaaggttttccccagcctgaccaatagccgccacacaggtttccggactggtcaatcgacaaatttcttccgtcgttgcgcgcgtcccttttccccataagaaatcggctttttccaggctaactttgtcatctttaatcttcagccataccggtgatttcgccttcccttcgataataatgacgtcgtatccagcgaatttcatttgcgctgcaaaaaagccacccatatgggcatcgacgactaaatttcctttggtaaaagtagaaagtgaggtgatatttacgcgagaactacagggggcaccagatccagttaatgggccggtagcaaagactaatttattcgcttcatcgaaaggtttcgtgcctggcggtacttcgtcatacataattttgtagccgaagcccatgccaccgacaaaacttttaaacttactggaatcttcgagggtaatatttcctgtcgtgagattgactcttaatatattacctgtccaaccgttagccatgattttttcctttgcaagattcacacagtaatatctttccactcgataatttttaacgcccctgttgggcaggcgtttgcgcattcaccgcataacacacatttcgaggattttttactttcggtatttacggtggccatcatccacgggcatgccgtagtacaggcgctacagccaatacagcgtttatgatcgacggtaatacagccttctttctgctgccaggtaatcgcaccaatcgggcagacgttcatgcattgcggctctttgcattgacggcaggtgtccgcggtatagttgagatcgccatacaggccgccgccagagccaaccccgttgtcgccaaagaaataattgcgatggattttgatacgggagaagaatgtccctactgagccatcgttgaagttggtacaagagatttcacagcggtggcaacccgtgcatcgcgctcgctgggtcaccagcacccctttgggggtatttatcaaccctactgtgccgctatcaatatcttcctgtttgcaacccaaaagtgacagtaacgcaggggcaattgttagaccagcaaggccttttcctgatatacgcaagaattctaatcgcgttaagccaatatctaatagtggacgatcaaccgggttcatttatttcgcatcctcttcgcaaacacagtgctgacaattcagcagcctgatattaagcattcaactaatacgctgctgactctgtccccaacaccagatattttccctaacccgatagtgtatgagaaaagattaacgccgataaactaatcctttatggttaggagaaaaaataatgtgattattctgagcccttaacattgatcgttatcaattaaaattacaaagcaagaaattataagtgaactgatatttattatcatttgaaataaatttaacttaagcgacaattatttgtgactttcattgcagaaaataaaaataacattatcgctataaattaaaatacataccgaaattcgtataatttcagcagttgttatttagaatgattaactggaccgcaactgaagcaagaatatcaggatgaagcttaccgcctcatcctgaatggtcattttaccagtgcgttaatgacggtttccatcgcctgcttttccagctcactgcgctgaatgcgtttattggctaatgctgtacgtaatacgcctgcgataacaatatgctttggttcctgccccagatcgcgcatttccagcacaactttaccgacaactctgcacatttctcggtacagttcatcctcttttgtccgatttcccattctttatacctatttatcatgccaactatcagcatatatcaatctaaccaattaaacaaaaatcaaacaaaatcagacaaataacgcgataaattattttaactgtagcaattgagcgatgatatatttatacaccggatgaactttcacttatcctcacactgacaacttcggcaccagacgttgcgcaaacagtgaagtttttgcgtaaccttttccctggaacgttaaatctttgataacaatttattgtctaacaagttgtatattttttgaaacgctgtttttgttttccttttggattaatttcagcgtataatgcgcgccaattgactcttgaatggtttcagcactttggactgtagaactcaacgactcaaaaacaggcactcacgttgggctgagacacaagcacacattcctctgcacgctttttcgatgtcacctatccttagagcgaggcaccaccactttcgtaataccggattcgctttccggcagtgcgcccagaaagcaagtttctcccatccttctcaacttaaagactaagactgtcatgaaaaagaccaaaattgtttgcaccatcggaccgaaaaccgaatctgaagagatgttagctaaaatgctggacgctggcatgaacgttatgcgtctgaacttctctcatggtgactatgcagaacacggtcagcgcattcagaatctgcgcaacgtgatgagcaaaactggtaaaaccgccgctatcctgcttgataccaaaggtccggaaatccgcaccatgaaactggaaggcggtaacgacgtttctctgaaagctggtcagacctttactttcaccactgataaatctgttatcggcaacagcgaaatggttgcggtaacgtatgaaggtttcactactgacctgtctgttggcaacaccgtactggttgacgatggtctgatcggtatggaagttaccgccattgaaggtaacaaagttatctgtaaagtgctgaacaacggtgacctgggcgaaaacaaaggtgtgaacctgcctggcgtttccattgctctgccagcactggctgaaaaagacaaacaggacctgatctttggttgcgaacaaggcgtagactttgttgctgcttcctttattcgtaagcgttctgacgttatcgaaatccgtgagcacctgaaagcgcacggcggcgaaaacatccacatcatctccaaaatcgaaaaccaggaaggcctcaacaacttcgacgaaatcctcgaagcctctgacggcatcatggttgcgcgtggcgacctgggtgtagaaatcccggtagaagaagttatcttcgcccagaagatgatgatcgaaaaatgtatccgtgcacgtaaagtcgttatcactgcgacccagatgctggattccatgatcaaaaacccacgcccgactcgcgcagaagccggtgacgttgcaaacgccatcctcgacggtactgacgcagtgatgctgtctggtgaatccgcaaaaggtaaatacccgctggaagcggtttctatcatggcgaccatctgcgaacgtaccgaccgcgtgatgaacagccgtctcgagttcaacaatgacaaccgtaaactgcgcattaccgaagcggtatgccgtggtgccgttgaaactgctgaaaaactggatgctccgctgatcgtggttgctactcagggcggtaaatctgctcgcgcagtacgtaaatacttcccggatgccaccatcctggcactgaccaccaacgaaaaaacggctcatcagttggtactgagcaaaggcgttgtgccgcagcttgttaaagagatcacttctactgatgatttctaccgtctgggtaaagaactggctctgcagagcggtctggcacacaaaggtgacgttgtagttatggtttctggtgcactggtaccgagcggcactactaacaccgcatctgttcacgtcctgtaatattgcttttgtgaattaatttgtatatcgaagcgccctgatgggcgctttttttatttaatcgataaccagaagcaataaaaaatcaaatcggatttcactatataatctcactttatctaagatgaatccgatggaagcatcctgttttctctcaatttttttatctaaaacccagcgttcgatgcttctttgagcgaacgatcaaaaataagtgccttcccatcaaaaaaatattctcaacataaaaaactttgtgtaatacttgtaacgctacatggagattaactcaatctagagggtattaataatgaaagctactaaactggtactgggcgcggtaatcctgggttctactctgctggcaggttgctccagcaacgctaaaatcgatcagctgtcttctgacgttcagactctgaacgctaaagttgaccagctgagcaacgacgtgaacgcaatgcgttccgacgttcaggctgctaaagatgacgcagctcgtgctaaccagcgtctggacaacatggctactaaataccgcaagtaatagtacctgtgaagtgaaaaatggcgcacattgtgcgccattttttttgtctgccgtttaccgctactgcgtcacgcgtaacatattcccttgctctggttcaccattctgcgctgactctactgaaggcgcattgctggctgcgggagttgctccactgctcaccgaaaccggataccctgcccgacgatacaacgctttatcgactaacttctgatctacagccttattgtctttaaattgcgtaaagcctgctggcagtgtgtatggcattgtctgaacgttctgctgttcttctgccgatagtggtcgatgtacttcaacataacgcatcccgttaggctccacggaatatttcaccggttcgttgatcactttcaccggcgttcccgtccgcacgctggagaacaaggctttaatatccggtgcattcatgcgaatacaccctgaactgacgcgcaaaccgacgctgtccggcgcactggtaccatgaatgaggtattcgccattaccatgcgcgaggcgcagtgcgtaacgtcctagcgggttatttggtccggcaggaacgactggcggtaatttaatgccacgctccagcgaacgctgacgaatgcctgccgtaggcgtccaggttgggttagggattttctgcccaacacgcgtttccatcaccggcgtttccagcccctgcaatccaatacctattggataaacctgcacaatattttctcccggcggataataataaaggcgcagctctgcaaggttaacgataatcccctgacgcggtgcatcaggtaataacagttgtgaaggaatagttatcgtcgtaccaggttttggcaccggggcgatagtgttattggcttcaaggatcaacattgccgcagtatcaaaacgtcgggcaatagcctgaaggtttttatccccttcttgcaccgtatacgtttgattttgcccaaccagtcggcttccggttggtggtagcggataatcaaccgcccaggcagcctggatggcgctaaaagcgccgataagcgtgagtgtaagcaaagacgcgcgtttcattgtaaacctcctgtatttgccggagactcacgctgaaacgtcggatggcgcttatgttcacctgaaaccaaaacactcctgtgcaggtcagtgtaaacattgaccatccggcaatgtgagccaaccggatgaaagctgtccttttagtttagctaagtgcagcggctttggcgcgaattgcgcgaatcatcgcttccagaccttgtgaacgagatggggtgagatgttgggtgagcgccattttttcaaaccacggacgcacatcgaaattgacaatatcctgcggcgtcatctgatcgtagagaataaagacgaccgcaataagccctttcacaatcgccgcatcgctgtcgccctgtaattcaataattccctgggcattctggcgcatgacaatccacacctgactctgacagccctgaatgctattttgtggacttctgtcttcgtcgcgtaattctggcagacgctggcccagctcaataatgtagagatatttctcttcccagttggcgcagcgtaaaaaattacgcagcaacttttctttatccggcaataaagccatagtgcctccctgttatcccagcaaacggtgaatacgttgcaggccggtcaccagacgatccacttcttcatgggtgttatacatggccagcgacgcccgacacatcgcagggacgttgtaataggccatcaatggcattgcgcagtgatgtccggtacgcacagcaatgccgtaattatcgagaaaactgccaacatcataggcgtggtgtttaccgagattaaaagcaataacgccaagcctgttttgtgggccatagagagtgagatccggtacagattccagctgtgatagcgcataatgcatcagattctgttcatactcggctatgttattaagccccagcgccgaaacatactccagcgccgcgccaagaccaatgatgcccccggtattgggtgtaccggcttcaaaccgccatggtgctttggtccaggtagtgccttcactcaggctgacggtggcgatcatagaaccgcccccttcccacggcggcatctcctgcaacaaggcttctttcacataaagaatgccaattccggtggggccatacagtttatgcccggagaacacgtaaaagtcgcaatccagcgcctgaacatccaccggatgatgcatcaccgcctgagcgccatccaccagcacttttgcgccatgctggtgcgcaagcgtgatcatttccgccagtggattttctgtgccaagcacgttggagacatgagtaattgccagcaggcgagttttctcatcaaacagcgtaggcagcgtctccagttgcaacgtaccatcgggattgagcgggatcacacgcagctctgcgccaacgcgtgcgcaaagcatctgccagggaacaatgttagcgtggtgctccatctgactgatgatgatgttatcgcccgcccgcacgttgctgttgccccagctattggcgaccagattgatcccttccgtcgtgccgcggacgaacaccagctcttccgccgaacgggcattaataaacagcgatgcccgcttgcgcacgttctccattttctcggtcgcctgggcgcttaaggtatgaataccacgatgcaccgccgcgtagccatgacgataaaactcggcctcggcgtcaatcacctggctcggtttctgcgcactggcggcgctgtcgagataagccagcggcaaaccgtttacctcacgcgaaagcaccggaaagtcggcccgcactttgtcgacggaaaaaatcatcttgcacctcctggcagccgttgaccgattcgggccagcacctgctgtttaagcccctcatcacgcagtgcttccgtcagttcggcagcgaaggcgtaaatgatcatctgctgggcatcctgctgattgatcccgcgcgagcgcagatagaatatctgttcatcatcaatacgccccaccgtcgcgccgtggctgcatttcacatcatctgcatagatttccagctgcggtttcgtatccacttccgccagtttgcccatcagcagattgttgttggtcatctgaccatccgttttgatggcgtgctgcgcgacgttgatcaaaccgttaaataccgcgcggcctttgtcgctgacgatagttttgtgcaactgtcggctgttacaaaaacctttattgtgttccagccaggtacgggtatcacacacctcgtttttcaccggcatcgccaggctattgatccgcagcgtgctgttttcgccattgagttgcgtactggtgttgtgtcgtaacactgcgccacccagcaggaaactgtggctaaatgcggtggcatcctcagccagcaacaaatcgttatgagcaaagtggtgactgagcgggttttcaaacgccagcttgatatgctgcaagtgggcattcgctgcgacgttgatagtgaaccgtgccccggtaaaatgacgagcatcattcaggctgacaaaatgttcgatcaccgttgcttcggcaccttccgccagatccagatgatgtcggtaatgggcagtgttcacctcttcacctgccacgccctgggtgatatgcattaacagcaatggctttgccggccgttgaccgcgcttcacggcgatatgcgtcacgctttgtgccaggctttccgtcaaatgcagaaacacttccgcctgaatagcgtcgggtaaaccctgacggtcgtcgttaatgctcacttcatatccgctgccttcagttgcatcgctcagtgcgggcacgtaacgcccatcgacaaacaccagccgcacggagtctaacgttaacgctaaggcatcacgctgctgtggggatatctctcccgcaatgctgacaaactggctattgatcagcccttccagcggcgtatatttccagttttcatgtttacgtgtcggcagtccggtacgcagcaattgttgtaaatgctgctgtgcttgcggggagcgttttgtcccttcagcttcaaacaagtgatgccactgttgcagcgcgttactgctgttcggtaagccagccataaccctgctcctccagttgtttgaccaacgtgaaatcgccggatttcacaattcgtccctgatatagcacatgaacgtaatcaggcttgatgtagtcgagaatgcgttggtagtgcgtaacaatgatgaatgagcgcttgccatcacgcagcgagttcacgccatcggcgaccacttttaatgcgtcaatatccagcccggagtccgactcatcaagaatgcataactccggttccagcaccgccatttgcaaaatatcgttgcgctttttctcgccgccggaaaaaccaacgtttaccgaacgggttaataaatcttccggcatcttcaggagagcgattttctcttccatcaaatcctgaaaatcaaagcggtcgagcgtttcctggccgcgatagctgcgcaccgcattaagtgccgtttgcaggaaaaactggttactgacacctggaatctccaccggatactggaaggccataaagatgccttcgcccgcgcgatcttccggcgacagcgcaagcaaatctttgcctttgaactcaaccgtgccgcccgtcacttcataatcttctcgcccggcaagcgttgccgataaggtacttttgcccgaaccgtttggccccataatggcgtgaacttcgccgggatgaacgtcgaggcttaatccgcgcaggatagctttatcttccacgctgacgtgtaaatctttaatacttaacatgtttattccttatccgacgctgtgttcaagactgatggcgaggagtttttgtgcttcaacggcaaattccaacggcagctccgagaacacgtctttgcagaaaccgttaacaatcatcgagatggcgtcttcttcgctgatcccgcgttgcaggcagtaaaacagttgatcttcaccaatacgtgatgtcgttgcctcgtgttccagttgcgcactattgttacgacactcaacatacgggaaggtatgcgccccacaattagcgccaatcagcattgagtcgcactgagtgaaattgcgcgcattggttgccgtcggcatgattttcactaagccgcgataactgttctgactatgtccggcagagatccctttcgagataatggtcgatttggtgtttttaccgatgtggatcatcttggtgccggtatccgcttgctgatgaccgctggtcagcgccactgagtaaaactcaccaatggagttatcgccgcgcaaaatgcagctgggatatttccacgtaatcgctgacccggtttctgattgcgtccatgacattttgctgttttcgccttcgcacaaagcacgcttggtgacgaagttgagaataccgccggtgttgttatcgccaggaaaccagttttgtaccgtggaatatttcacctcggcgtttttatggatgatgacttccaccactgccgcgtgtaactgatagctgtcacgcaccggagcggaacagccttcaatgtagctgacgtagctgtcttcgtcggccaccagaatggtgcgctcaaactgcccggttttttctgcgttaatgcgaaaataggtggaaagttccatcgggcagcgcacgcctttaggcacataaataaacgtaccatcagaggctaccgccgcattaagcgcggcaaagaagttgtcattccccggcaccacggtgccgagatatttacgcaccagttccgggtgatcgtggatcgcctcaccaaaggaacagaaaataattccctgctccgccagtttttcgcgataagtagtggcaaccgaaactgagtcgaaaatggcatccaccgccacctctttgccttcccgcacgggaacgcccaactgctcaaacgccgcctccacctctttacttaaaaaggcgttcgcgccagtttgctgcaccgcgccaggttcagacgcgcaagtgtcgtcacaattaccgcacgatggtgctgagtagtagctgtaatcctgataattcagcttgtcgtagtgcgctttcaaccagtgcggttcttccatctccagccatgcgcgataggcgtttagacgaaactccagcatccactccggctcattacgcttcgccgaaattgcgcgcaccacctcttcgtttatcccctttgccagctcatcggtggctaactgggtgaagaatccttctttataattcagcgggccgccggtccaggttttgacatcgtcagttgcttcagtattacgagacatagtaccgcctataccccaaagctttcgccacagccacattcattctgggctttagggttgtgaaatttgaatatctgattaagtccttcacgaacgaaatcgacttccgtgccatcaataaacggcatcgcttgcagcgggacaaacagcttcgcgccgtcgtgttcaaacagcagatcgtctttgtccggctcgctaacactgtcgagcacatagccaaagcccgcgcagcccgtttgcttcacgcctaagcgcacgccgaccatacccggctgctttgccaccagctcacggatgtgtatcgccgctgcgggtgtcagcgttaagccttgccaggcgaaatcttgtgggttaaaggttcctgaatgcatgtccatcgatttacctcacttcatcgctttcagcgtataacagcatgttagtgataatgattatcagttcaacccagcaaacgcaggggctttaccgtaaaacatgctttttgcctgcttttaataagcatagaccctgatgtgtgggttaacaggcacgctaagaattaggtatctcattgttagataatggttattatctaaggagcattaaggctgtgatgaaaaagaaaaagttgtattgaaaatgactatttaagagataggtaaaaaagtgcagcgttcagaaataagaaaacccttaagtctgtgcgacacaggcttaagggtttctaccccatccggcgcttatctccggcactctcagtggcttagctcttgaaggggcgataagaataatctcataaagctaacccgccgttttaacacaaactgcgattagtattatttttgaacaatatcaggcggtagataagcagtattaagaaggtcatcgaacctggacggaggttaatccaggtcgatttggcgaacttgcggcattaagtcaggatcaatgcacgcccagacgccaggcaaagtagatttcttcttttaattcagcagaagagagagtaagcaggtcagcaaattcaagttctagttgtttcagacgtttgagatattgggcaggtgaaagattgctctggtcacggcgtaaaaattcaatggccagctgggtgggatcaagttgagtagacatagcatcctcgcttttagacaagacctgcacagtataccaccgtttactgtgcagataatgaccaaaagcaatatgcgtcacacttttctggtgacaacgtcacaaaatggcggtcgtcaatcgtgacgaacagcacaaacgccctttctcatcgaagatttcaatctgccagacctggtgacgcgaaccgagatgcaacggtttgcatacgccgcgcacccgcccttctcgtgccgagcggacgtggttagcattgatttccagaccaaccactttttgctcaccttcggtacataaataaccggcaacggaaccgatactttcggccagtaccacggatgctcctccatgcagcaacccgaaaggctgctttgtccgcgagtctactggcattgtcgcttcaagggtgtcatcaccaatatgttcaaagcgaatatccaggaaccccaccatgtttccttcacccatagcattcagtgcttccagggtgattttccgtttccatatcatttaataatctccagtaaagcctgcacaggatggcgtacccccgtgccttcaacccgttttacctggctacggcaggaatatccggtcgccagacagcggttacgcggcagtcgctgcatagcctgatgccaggataactcatagatcccgagcgaattttcatggtttttcgcttcatgtccgtaagtccctgccatgccgcagcaacccacgctgacattttccagtttcgcgccaaaacgggcaaatatcgcggcccattgtgctggcgcacccggcaaggcggtaacttcggtacagtgaccaaagaaataccatgattcaccgctgactgtagccactggctgtgactcaagtgcgcttgccagccattcattcgccagtaagacgttaaactcgccacgctcctcgcccagcgccagtttatattcatcgcgataacaaagtaccagcgccggatcgacgcccaccattggcatacccagcttcgccatacggttgaggaaatccgccgtctttttcgccgtcttcgcaaaacgattaagaaaacctttaatatgctgggctttgccatttggcgaaaatggcagtaacacaggctggaaacctaatttttcgaccagacggacaaaatccgccaccacttgcgcatcgtaatagctggtaaaggggtcctgcaccaccaacactgtgcgcgctttctgctctgcattgagagattcaagctgttccagcgtcatgtttgccgagcgatgccccaccatttgttgttgtagcgaggggaccgacagcagcggcaaatcaaccatgccgatatgtttttccgagagtttgcgcaccagcggctggttaatgaagaagttaaaggttttcggcgcgcgtgccatcagcggcgcgtagctctcgaccgtagcgacgaggtggtcgcgcagcgggcgtaaataacgggtgtgatagagctgcagaaaacgagagcgaaactccggcacatcaattttgatggggcactgggtcgaacacgctttacaggccagacagcccgacatcgcctctttgacttcgtgtgagaagtcatattcgcctttattcgcatgccagctattgcgcgtgcgggcaattaacgtccgcaaactgacgccggattcaggcagttcttgttccagtttgagtggatcaacgccgcgatccgccaacaaacgcagccattcacgcaccagcgttgcgcgccctttcggtgaatgaatccggttctgggtgatcttcatcgacggacacatcggactacgggcatcaaagttgaagcataaaccgttgccgttacactccatcgcaccgcgccactgctggcgtaccgcaatggggatctgccgatcgaatgtaccgcgcttcaccgcgtccactttcatcatcggcgcatcgagaccttctggcgggcaaatcttccctgggttgagtcggttatgcgggtcaaatgccgctttcactttgcgcagttctgcaaaaagttcctcaccgaaaaacgccgggctgtattcagcgcgaaaacctttgccgtgctcgccccacaacaaaccaccgtatttcgcagtcagcgccaccacgtcatcagagatttgcttcatcaaaatctcttgttgaggatcgcacatatccagcgctggacggacgtgcaagacacctgcgtcgacgtgaccgaacataccgtagcttaagccgtggctgtcgagcagcgcgcgaaattcagcaatataatccgccaggtgttccggcggtacgcaggtatcctcagcaaacggaattggcttagcggcacctttggcattgccaagcagaccaacggcttttttgcgcattgcatagatacgttcaacccccgccagctcacggcacacctgccagccgatgacacctgcttgatgactggcgatcagctcatccaaccgcgcacagagtgcatttacccgctcatcaatcagcgcctcatcatcaccagcaaattccacaatgttcagcccgagcatctcttggtcaggcacatcggtaatcaactcgctgacggaatgccagacaatatcttcccgcgccagattcagcacttttgagtccaccgtctctaccgaaagcgcccgcgcctcaaccataaacggcgcgttacgcagcgcagagtcaaaagagtcatatttgacgttcaccagacggcgcactttaggcaagcgtgtaatatccagccgcgcttcggtaataaaggccagcgtcccttctgaacccgtcagaatgcgcgtcaggtcgaactcggtcatctcatcgttaaagacatgacgcagatcgtaaccggtaagaaagcggttaagtttggggaagttgtcgataattaactggcgttgctgacggcaacgttgataaaccgtgttataaattcgcccgattgtggtattggatttacccagcgtttccgccaattcgacgggtaaaggttgcgtatcgagaatatcgccccccaacaacaccgcgcgtacgccaagtacgtgatctgacgttttgccatagaccagcgatccctgaccggatgcatcggtattgatcatcccaccgagcgttgcccggttgctggtcgaaagttccggcgcaaaaaagtagccgaacggtttcaggtactgattgagttgatcttttatcaccccggcctcaacgcgcacccagccctcttcagggttaatttcgatgatgcggttcatatggcgggacatatcaacaataatcccctggttgagcgcctgaccgttagtgccggtgccgccgccgcggggggtaaagatcagcgatgaatagcgttcctgcgcggcaagacgggcgatcagcgccacatctgcggttgaacgcggaaataccaccgcatcggggagaagttggtaaatactgttgtcggtcgacattgtcagacgatcggcataacttgtcgccgtatcgccggtaaaaccttgttgctccagctcttgcaaaaaattaagcaccagttgaacgacgccgggtgcctgggaaatctgtggaatcattatattgaccctttcctgcggtctgtgatgtaggtcgatacactattctttcaggctgctgcaatagcgcactgaaaggtgatgtttgtttactctatggatttcgtgttgcaggaaggcggcaagcgagtgaactccaggagcttacaatagtaagtgactggggtgaacgaacgtagccgcagcacatgcaacttgaaatacgacgagtaaatcgtttgcgtgttgcctgagttgttgtaccacatttttttctaacacgcccatcagaattaagggcagaatcggcctgttaaaaaccgctgaaattgctcatcattatgcaggtgagtttcgcgtgttcacgtcgcgtcgacgatttgacgcacaaaaaaggtgaaaagtagttatggtaaatgttcgtcagcccagggatgtcgcacaaattctgctttcggtgctgtttttagccatcatgattgtggcatgtctgtggattgttcaaccctttattctcggctttgcatgggccggtacggtggttatcgccacctggccggtattgttacgtttgcaaaagatcatgtttggccgccgctctctcgccgttctggtgatgacgctgttattagtgatggtgtttatcatccctattgctttgctggttaacagtatcgtcgacggcagcggcccgctaattaaagccatttccagcggtgacatgacgttacccgatctggcgtggcttaataccattccggtgattggcgcgaagctgtatgcaggctggcacaacttgctggatatgggggggacggcgatcatggcgaaagtccgcccttatattggcaccaccaccacctggttcgttgggcaggcggcgcatatcgggcgctttatggtgcattgtgcgctgatgcttctcttcagtgccctgctgtactggcgcggtgaacaggtggcacaaggcattcgccattttgcaacccgtctggcaggcgttcgcggagatgccgccgtgctgctggcggcacaggctatccgcgcggtggcgctgggtgtggtggtgacggcgttagtacaggcagtgcttggcggtatcggcctcgccgtatccggcgtaccttatgcaacgttgctaacggtgttaatgatcctctcctgccttgtccagcttggcccgttgccggtactgattccggcgattatctggctctactggactggcgataccacctggggaacggtattgttagtgtggagcggtgtggttggcacgctggataacgtcatccgcccaatgttaattcgcatgggtgccgatttaccgctgatcctgattctctctggcgttattggtggtttgattgctttcgggatgatcggtctgtttattggtccggttctgttagccgtttcctggcgtctgtttgccgcgtgggtggaagaagtcccgccgccgacggaccaaccggaagaaattctcgaagaacttggcgaaatcgagaaaccgaataagtaatttctcatcaggcggctctgccgcctgattgttaaccaccgctaattgatatttgcttgctcttccccatattttcctgcttaccgccattcagctggtagtacctgtcgcaaattctttacagtttttaaactaatgagacgaatctgatcgacgcaaaaagtccgtatgcctactattagctcacggttataaatcaacatattgatttataagcatggaaatcccctgagtgaaacaacgaattgctgtgtgtagtctttgcccatctcccacgatgggcttttttttaacatttttccgcttcgctacctcgcccctcactctttccaataatgttgcacaagatactgtgactctcttcaagccgtcagcaggctgataatgttatttatattttattgtttatttcatgcagccattacacgatgaacgcttatgaactccaggcactccgccatatttttgccatgactattgatgaatgcgcgacctggattgcccagaccggtgacagtgaaagctggcgtcagtgggaaaatggcaagtgtgccattcctgatcgtgtagtcgagcaactgttggctatgcgtcagcaaagaaaaaaacatcttcatgccatcatagagaaaataaataaccgcatcggcaacaacaccatgcgttttttccccgacttaaccgcatttcaacgagtctaccctgatggcaattttattgactggaagatctatcaatcggtagctgctgaattatatgcacacgatctggagcggctttgttaatttttccacagaaaggaattgtcgttgttacaacaataatgaacggatgctgacacaacatcgcttcactttttaaagcacctttgctaagtagaacctatgaaaaatccctatttccctaccgcacttgggttgtattttaattacctggtgcatggtatgggcgtccttttgatgagcctgaatatggcctcgctggagacactttggcagactaataattaataataagcgggtgtctcgatagttatctcatcgctgggcattggtcgattaagtgtcttgctttttgcaggattattatccgatcgctttggtcgccgcccttttatcatgctcgggatgtgctgctatatggccttcttttttggcatcctgcagaccaataacatcattatcgcttatgtttttggctttctggcgggaatggcaaacagttttctcgatgcaggcacttatcccagtttgatggaagcttttccacgctcacctgggacagccaatattttaattaaagcatttgtttccagcggacaatttttattaccgctaatcattagcctgttagtgtgggctgaactgtggttcggttggtcctttatgattgctgcaggcattatgtttattaacgctctgtttttataccgttgtacgttcccaccccatccgggtcgtcgcttacctgtcataaagaaaaccaccagctctacggaacatcgctgttcaattatcgatttagccagttataccttatatggctatatctcaatggcaacgttttatctggttagccagtggctggcacagtacggacaatttgttgcaggcatgtcatacactatgtcgatcaaactactcagtatctacaccgtgggttcgctgctttgtgtatttattaccgctccactcattcgtaataccgttcgcccaacaacattactgatgctgtacacctttatctcatttattgctctgtttaccgtctgcctgcatcccacattttatgtggtgataatatttgcttttgtcattggttttacctctgctggaggtgttgtgcaaattggcctgacgttaatggctgaacgtttcccttacgctaaaggtaaagctacagggatctattacagtgcgggcagtattgcgacctttactattccgttgattacggctcatctgtcccaaagaagtattgccgatattatgtggttcgataccgccatcgctgccatcggttttttactggcactgtttatcggcttacgcagccgcaaaaaaacgcggcatcactcgctaaaggaaaatgtcgctccgggtgggtaatgcaatattcttttcaggtcatgcaagatcttacggataaataactctttctgcgctaactaaggaaaatcgcgatcaaaaacaaactatgacatgcaatattcctggaaacataaactttatgccatgtacccagggaaaatcatcttcagtatagtaattatgtaaaccgtcggagaacaatacgtacggtaacgaaattatctttcagcaaggagctgtgaaaatgtctcaaaataaggctttcagcacgccatttatcctggctgttctttgtatttacttcagctacttcctgcacggcattagtgttattacgcttgcccaaaatatgtcatctctggcggaaaagttttccactgacaacgcgggcattgcctacttaatttccggtatcggtttggggcgattgatcagtattttattcttcggtgtgatctccgataagtttggtcgtcgggcggtgatattaatggcagtaataatgtatctgctattcttctttggtattcccgcttgcccgaatttaactctcgcctacggtctggcagtgtgcgtaggtatcgctaactcagcgctggatacgggtggctaccccgcgctcatggaatgctttccgaaagcctctggttcggcggtcatactggttaaagcgatggtgtcatttgggcaaatgttctacccaatgctggtgagctatatgttgctcaataatatctggtacggctatgggctgattattccgggtattctatttgtactgatcacgctgatgctgttgaaaagcaaattccccagccagttggtggacgccagcgtaactaatgaattaccgcaaatgaacagcaaaccgttagtctggctggaaggtgtttcatcggtactgttcggtgtagccgcattctcgaccttttatgtgattgtggtgtggatgcccaaatatgcgatggcttttgctggtatgtcagaagctgaggcattaaaaaccatctcttattacagtatgggctcgttggtctgtgtctttatttttgccgcactactgaaaaaaatggtccggcccatctgggctaatgtatttaactctgcactggcaacaataacagcagccattatctacctgtacccttctccactggtgtgcaatgccggagcctttgttatcggtttctcagcagctggcggcattttacagctcggcgtttcggtcatgtcagagttttttcccaaaagcaaagccaaagtcaccagtatttatatgatgatgggtggactggctaactttgttattccactgattaccggttatctgtcgaacatcggcctgcaatatatcattgttctcgattttactttcgcgctgctggccctgattaccgcaattattgtttttatccgctattaccgcgttttcattattcctgaaaatgatgtgcggtttggcgagcgtaaattttgcacccggttaaacacaattaagcatagaggttaaaggagttaattatggatgttaccgcaaaatacgaattgattgggttgatggcctatcctatccgccacagtttatcgcccgaaatgcagaataaagccttagaaaaagcgggattgccatttacctatatggccttcgaagtggataacgatagctttcctggagcaattgaaggattaaaagccctcaaaatgcgcggaactggtgtatcgatgccgaacaaacaactggcgtgtgaatatgttgatgaattaacaccagctgccaaactggtgggggccatcaacaccatcgttaatgatgatggctatctgcgtggctataacaccgacggcacgggccatattcgcgccattaaagagagcggttttgatatcaaaggcaaaacgatggtgctgttaggggccggtggtgcctcaacggcaattggcgcgcagggggcaattgaaggtttaaaagaaattaaactctttaaccgtcgggatgagttcttcgataaagccctcgccttcgcgcagcgggttaatgaaaacaccgattgtgtcgtcacggtcaccgatctcgccgatcagcaagcctttgctgaagccctggcttccgccgacattttaaccaatggcacaaaagtgggtatgaaaccccttgagaatgaatcattggttaatgatatcagtctgttacatccgggacttctggtcactgaatgcgtgtataacccgcatatgacgaagttattgcagcaggcgcaacaagctggttgcaaaacgattgatggatacggcatgttgttgtggcaaggggctgaacagttcacattatggactggcaaagatttccctctggaatatgttaaacaggtcatggggttcggtgcctgacaggctgaccgcgtgcagaaagggtaaaaaatgaaaaccgtaactgtaaaagatctcgtcattggtacgggcgcacctaaaatcatcgtctcgctgatggcgaaagatatcgccagcgtgaaatccgaagctctcgcctatcgtgaagcggactttgatattctggaatggcgtgtggaccactatgccgacctctccaatgtggagtctgtcatggcggcagcaaaaattctccgtgagaccatgccagaaaaaccgctgctgtttaccttccgcagtgccaaagaaggcggcgagcaggcgatttccaccgaggcttatattgcactcaatcgtgcagccatcgacagcggcctggttgatatgatcgatctggagttatttaccggtgatgatcaggttaaagaaaccgtcgcctacgcccacgcgcatgatgtgaaagtagtcatgtccaaccatgacttccataaaacgccggaagccgaagaaatcattgcccgtctgcgcaaaatgcaatccttcgacgccgatattcctaagattgcgctgatgccgcaaagtaccagcgatgtgctgacgttgcttgccgcgaccctggagatgcaggagcagtatgccgatcgtccaattatcacgatgtcgatggcaaaaactggcgtaatttctcgtctggctggtgaagtatttggctcggcggcaacttttggtgcggtaaaaaaagcgtctgcgccagggcaaatctcggtaaatgatttgcgcacggtattaactattttacaccaggcataagcaataatatttcggcgggaacaccctccccgccgaactaaaaaatatattcaatcgtatttaataaaaatatttcgtgagtctctgtgcgctaattctccatttggcgtagggaaaatcacatctgaatcaggaattaacaatgaaacctgtaaaaccacctcgtattaatggacgagtgccggtcctgtcggcacaggaagcggtgaattatattcccgacgaagcaacactttgtgtgttaggcgctggcggcggtattctggaagccaccacgttaattactgctcttgctgataaatataaacagactcaaacaccacgtaatttatcgattattagtccaacagggcttggcgatcgcgccgaccgtggtattagtcctctggcgcaagaaggtctggtgaaatgggcattatgtggtcactggggacaatcgccgcgtatttctgaactcgcagaacaaaataaaattattgcttataactacccacaaggtgtacttacacaaaccttacgcgccgccgcagcccaccagcctggtattattagtgatattggcatcgggacatttgtcgatccacgccagcaaggcggcaaactgaatgaagtcactaaagaagacctgattaaactggtcgagtttgataacaaagaatatctctattacaaagcgattgcgccagatattgccttcattcgcgctaccacctgcgacagtgaaggctacgccacttttgaagatgaggtgatgtatctcgacgcattggttattgcccaggcggtgcacaataacggcggtattgtgatgatgcaggtgcagaaaatggttaagaaagccacgctgcatcctaaatctgtccgtattccgggttatctggtggatattgtggtggtcgatccggatcaaacccaactgtatggcggtgcaccggttaaccgctttatttctggtgacttcacccttgatgacagtaccaaacttagcctgcccctaaaccaacgtaaattagttgcgcggcgcgcattattcgaaatgcgtaaaggcgcggtggggaatgtcggcgtcggtattgctgacggcattggcctggtcgcccgagaagaaggttgtgctgatgactttattctgacggtagaaacaggtccgattggcggaattacttcacaggggatcgcctttggcgcgaacgtgaatacccgtgccattctggatatgacgtcccagtttgatttttatcacggtggcggtctggatgtttgttatttgagttttgctgaagtcgaccagcacggtaacgtcggcgtgcataaattcaatggtaaaatcatgggcaccggtggatttattgatatcagtgccacttcgaagaaaatcattttctgcggcacattaactgcgggcagtttaaaaacagaaattaccgacggcaaattaaatatcgtccaggaaggacgggtgaagaaatttattcgggaactaccggaaattactttcagcggaaaaatcgctctcgagcgagggctggatgttcgttatatcactgagcgcgcagtattcacgctgaaagaagacggcctgcatttaatcgaaatcgcccctggcgtcgatttacaaaaagatattctcgacaaaatggatttcaccccagtgatttcgccagaactcaaactgatggacgaaagattatttatcgatgcggcgatgggttttgtcctgcctgaagcggctcattaacaggagtataatgatggatttttctttaactgaagaacaagaactgctgctggccagtattcgcgaactgattacgactaactttccggaagagtatttccgcacctgcgatcaaaacgggacatatccgcgtgagtttatgcgggcgctggcggataacggtatttccatgcttggcgtgccggaagaatttggtggtatccctgcggattacgtcacccaaatgctggcgctgatggaagtgtcaaaatgcggtgctccggcatttttaattaccaacggtcaatgtattcacagtatgcgccgtttcggttctgcagagcagctacgtaaaacggcagagagcaccctggaaacgggtgatcccgcctatgccctggcgttgacggaaccaggtgctggctcagataacaacagtgccactaccacttacacgcgtaaaaacggcaaggtctacatcaacggacaaaaaacctttattaccggtgcgaaagagtacccgtatatgctggtgctggcgcgcgatccgcaaccgaaagatcccaaaaaagccttcaccctgtggtgggtcgactccagtaagcccggcattaagattaacccgctgcataaaatcggctggcatatgctcagcacctgcgaagtctatctcgacaacgtggaggttgaagagagcgacatggtgggcgaagaaggaatgggtttcctcaatgtgatgtacaactttgagatggagcgcctgatcaacgccgcgcgcagcaccggctttgccgaatgcgcctttgaagatgccgcccgctatgccaaccaacgtatcgcttttggtaagcccattggtcataaccagatgatccaggaaaaactggcgctgatggcgattaagatcgacaacatgcgcaacatggtgctgaaagtggcatggcaagccgatcagcatcagtcactgcgcaccagcgcggcgctggcaaaactgtactgtgcacgtaccgcaatggaagtcattgatgatgcgattcaaatcatgggcggtctgggctataccgatgaggcgcgcgtctcccgcttctggcgtgatgtccgttgtgaacgtatcggcggcggtacagacgaaattatgatttacgtagcaggtcggcagatcctgaaagactatcagaacaaataatctgcaggcggcgcagcttcttaacaaactgcgccgccagatttatccaacaagacttaccggttgaggaaattcagataggatttcttgttccgcaaaacagtttttaaattgtctacggtaatcgctgggcgaacaaccgacatggcgcaaaaacagtttggcaaagtgatcgacattttcataacccacacgccaggagatctctgcctgtgataattcagtattagtgagtgaccattttgcttccgtcatacgccgttgaataacatagttaataggggaaatacgatactctttggtaaattcatggcaaatataactgacgctggcacgaaattttttcgataactgttctaaagtgattttttcgcgataattattattcagatagaaaagaatatcttttatcagaacatcttttttaatatacccctgctccgaacgataagcatttttaaaattttcgtagtaaagaatggctaacgtataggcaaatgcatcccataacgaagatgtttggctatttttactttgcggcaaaatcacacttagctcattaaataaggtttttatgacttcttttccctgccccgcggcaattaccggacaagaatgcggttgcagtagctgattttcctcagccccctgaaactgaaagccgtacagcgcacaggtacacgtcgttgccggatcgttaacgtcagaggccaccgcatgcagcctgccgcgttctatcaccacaatgtcatccgcatgtgcgacatataacgaagaatcgatggtaaaccttgcaacccctttcttgacgtaaatcaactcggtttcattgtcatgaacgtgatgtccggactcccattttggatcatcgctaaatgcaaaacgtgaaagccgtggcgttttaccggcgacaaacagcgtttcactggcgttatcaaaacagcgttgatacatgacaacctccctattccatgagcaagcaaaaacaatatatgccggataaaatacggcgtgtattgcggttatacaaccgcgtttagcgagagctaaacaagattatttacactgaatgcaagattgtacggtcatggaataactatattgccgcaaattgcacttttgttttagcgatcgcattttttttgcaagattgttggcaaggaaaacagcttgctccgtcgaaaaccccgcaccgctatcgcacactattttcaggccatttttaccttccatcggagatggttccgtatgcgactcacaggagaaatcatgaaaataataacctgctttaagctggtgcctgaagaacaggacattgttgtcactccagaatacaccctgaatttcgacaatgccgacgccaaaatcagccagttcgatctcaatgccattgaagctgcaagccagctcgcaacagatgacgatgagatagccgcgctgaccgttggcggctcattgttgcagaactcgaaagtgcgcaaagacgtgctatcccgcgggccgcacagcctgtatttggtgcaggatgcgcaacttgaacatgcactgcctctcgataccgcaaaagcgctggcggcagcaattgaaaagatcggcttcgatttactgatctttggtgaaggttccggcgacctttatgcccagcaggttggcttgctggtcggagaaattctgcaacttccggtgattaatgcagtgagtgctattcagcgtcagggcaatacactggtgattgaacgcacgcttgaagatgatgttgaagttattgaactctctgttccagccgtgctctgcgtcacctccgatattaacgtgccacgcattccttcgatgaaagccattctcggcgcgggtaaaaaaccggtaaatcagtggcaggcaagtgatattgactggagccagagcgcgccacttgctgaactggtcggcattcgcgtaccgccgcaaacagaacgtaagcacatcattatcgataacgattcgccggaggccattgccgagctggcggaacatctgaagaaagccctgaactgaagcctacggagaagaaacgatgagtcaattaaacagcgtctgggtctttagcgataatcctgaacgttatgctgaactgtttggcggcgctcagcaatggggccaacaggtgtatgccattgtacaaaataccgaccaggcgcaggcagttatgccttatggtccaaaatgtctttatgttcttgcgcaaaacgacgcgctgcaacgcactgaaaattacgccgaaagcattgctgccctgctgaaagataaacaccccgctatgttgctgttggccgcgacgaaacgtggtaaagcgctggcagcacggttaagtgtgcaactgaatgcggcgctggtgaacgatgccacggcggtggatattgtcgatggtcacatttgcgccgaacaccggatgtatggcgggttagcgttcgctcaggaaaagatcaacagcccgctggcgatcattacccttgcacccggtgttcaggaaccgtgcaccagtgatacctctcatcagtgcccgacagaaacggtaccttatgttgctccgcgtcatgaaattctctgtcgcgaacgccgtgcgaaagccgcaagcagcgtggacctgagcaaagcaaaacgtgtggttggcgtcggtcgtggactggcggcgcaggatgacctaaaaatggtccacgaactggcggcggtgctgaatgctgaagtcggctgttcacgtccaattgccgaaggcgagaactggatggagcgtgaacgttatatcggtgtctccggcgtgttgctgaaatccgatctctacctgacgctggggatctccgggcagatccagcatatggttggcggcaacggcgcaaaagtgattgtcgccatcaataaagataaaaatgcgccaatcttcaactatgccgactacggtctggtgggcgatatctacaaagtcgtccctgccctgattagccagttgagccgctaattcccctttcaaccacatctcccgctgtaaacgcagcgggaagggagcataacgcatgtcggatgacaaatttgatgccattgtggtcggtgcgggcgttgctggtagcgttgccgcactggtcatggcacgagccgggctggatgtcctggtgatagaacgcggcgacagtgccggatgtaaaaacatgaccggcgggcgtctttatgcccacacacttgaagcaatcattccaggctttgcagtatcagcgccggtagaacgcaaggtcacacgcgagaaaatctccttcttaaccgaagaaagcgccgttaccctcgattttcaccgcgagcagccagatgttccgcaacacgcatcttataccgtattgcgtaatcgtctggacccgtggttgatggaacaagccgagcaggcgggcgcgcagtttatcccaggcgttcgcgtcgacgcgctggttcgtgaaggaaacaaggtcactggcgtgcaggctggggatgatattctcgaagcgaatgtggtgattctggctgatggcgttaactcgatgcttggccgctcgctgggaatggttcccgcttccgatccgcatcattacgctgttggtgttaaagaggttattggcctcacaccagaacagatcaacgatcgctttaatattacgggcgaggaaggtgccgcctggctgtttgccggttccccttctgacggcctgatgggcgggggatttctctataccaacaaggattccatatccttggggctggtttgtggattgggtgatatcgcccatgcgcaaaaaagcgtgccgcaaatgctggaagattttaaacaacaccccgccattcgcccgctgattagcggcggcaaactgcttgaatattccgcgcatatggtgccggaaggcggtctggcaatggtgccgcaactggttaacgagggcgtgatgatcgttggtgacgccgcaggcttctgcctgaatttgggttttacggtccgcggcatggatttagccattgcatcggctcaggctgccgccacaacggtgatcgccgccaaagaacgcgcggatttctccgccagcagtctggcgcaatacaaacgtgagctggaacaaagctgcgtcatgcgtgatatgcagcattttcgcaagatcccggcgctgatggaaaacccgcgcctgtttagccaatacccacgaatggtagccgacatcatgaacgagatgttcaccatcgacggcaaaccaaaccagccggtacgaaaaatgatcatgggacatgcgaagaaaattgggctgatcaacttgctgaaagatggcattaagggagcaaccgcgctatgagccagaacgctacggttaacgtcgacatcaaattaggcgtcaataaattccatgttgatgagggccacccgcatatcattctggcggaaaatcccgatatcaatgaattccataaattaatgaaagcctgccctgccggactttataagcaggatgacgcaggaaacattcattttgattccgccggttgtctggagtgcggcacctgtcgggtgctgtgcggtaacactattctcgaacagtggcaatatcccgcaggcaccttcggtattgattttcgctacggctaatcatgcatcccacaggcccgcatctcgggcctgatgttctgtttcgagagtccaacatgaaagtgacattaacgtttaacgaacaacgtcgtgcggcgtatcgtcagcaagggttatggggcgatgcttcgctggccgattactggcagcagaccgctcgtgcgatgccagacaaaattgccgtggtcgataatcatggtgcatcgtacacctatagcgcgctcgatcacgccgcgagctgtctggcaaactggatgttagcgaagggtattgaatcaggcgatcgcatcgcatttcaactgcctggctggtgtgaatttaccgttatctatcttgcctgcctgaaaatcggtgcagtttccgtgccgctgttgccttcctggcgggaagcagaactggtgtgggtgctcaataagtgtcaggcaaaaatgttctttgcaccgacgttgtttaaacaaacgcgtccggtagatttaatcctgccgctgcaaaatcagcttccacaactacaacaaattgtcggcgtggacaaactggctcccgccacctcttccctctcattaagtcagattatcgccgacaatacctcactgaccacggcgataacgacccacggcgatgaattagctgcggtgctgtttacctccggaaccgagggtctgccaaagggcgtgatgctaacgcataacaatattctcgccagtgagcgggcttattgcgcgcgactgaatctgacctggcaggatgtctttatgatgcctgcgccacttggtcacgcaacgggctttctgcatggcgtaacggcaccattcttaattggcgctcgcagcgtgttgttagatattttcactcctgatgcgtgtctcgcgctgcttgagcagcagcgttgcacctgtatgctcggcgcaacgccgtttgtctatgatcttttgaatgtactagagaaacaacccgcggacctttcagcgctgcgtttctttctttgcggcggaaccacaatccccaaaaaagtggcgcgtgaatgccagcagcgcggcattaaattattaagtgtttatggttccacagaaagttcgccgcatgcggtggtgaatctcgatgatcctttgtcgcgctttatgcacaccgatggttacgctgccgcaggtgtagagattaaagtggtcgatgacgcacgcaagaccttaccgccaggttgcgaaggtgaagaagcctcgcgtggccccaatgtgtttatggggtattttgatgaacctgaattaaccgcccgtgccctggatgaagaaggctggtattacagcggcgatctctgccgtatggatgaggctggctatataaaaattaccggacgcaaaaaagatattattgtccgcggcggcgaaaatattagcagccgtgaagtggaagatattttattgcagcatcctaaaattcacgatgcctgtgtggttgcaatgtccgatgaacgtttaggtgaacgatcatgcgcttatgtcgtgctgaaagcgccgcatcattcattatcgctggaagaggtagtggctttttttagccgtaaacgggtcgcaaaatataaatatcctgaacatatcgtggtaatcgaaaaactaccgcgaactacctcaggtaaaatacaaaagtttttgttaagaaaagatattatgcggcgtttaacgcaggatgtctgtgaagagattgaataagtttcatcttcggggatcacataaccccggcgactaaacgccgccggggatttattttatttcttcagttcagccaggcttaaccaggtttgcaccacggtgtccgggttcagagacaggctatcgatcccctcttccatcaaccatgcggcaaagtcttcgtggtcggacggaccctgaccgcaaatcccgacatatttgccctgtttcttcgcggcacggatagccatcgacagcagtgctttcaccgcatcgttgcgctcatcgaacaattcagacaccacgccggagtcacggtccagaccgagcgccagctgcgtcatatcgtttgagccaattgagaagccgtcgaaatattcgaggaactgctcggccagcaaggcgttggacgggatttcacacatcatgatgattttcagcccgttctcgccacgtttcagcccctgacgcgccagttcttcaaccaccgctttcgcctgatctacggtacgcacgaacgggatcatgatctcaacgttggtcagtcccatgtcgttgcgcacacgtttcactgcttcacactccagcgcgaaacagtcgcggaagctgtcggaaacatagcggcccgcgccacggaagccgagcatcgggttctcttcatctggctcgtaacgctcaccaccgaccaggttggcatattcgttcgatttaaaatcagagagacggacaatgacgcgcttcggataaaacgcggcacccagcgtcgcgatcccttcagtcagacgaccaacgtaaaattcacgcggagaatcaaaacctttcatcatctcgcggatttcgttttgcaactgcggttcctgatcgtcaaactcaagcagtgcgcgtgggtggacgccaatcatacggttgatgataaattccagacgcgcaaggcccacgccttcgttcggtaggcaggcgaagtcgaaagcacggtccgggttaccgacgttcatcatcactttcaacggcagatccggcatcgtttctacgctggagcttttcacgctaaattccagcaactccgcatagacgtaaccggtatcaccttcggcacaagaaacagtgacgttctcaccgtctttcatccgttctgttgcatctccacagcccactaccgccggaatgcccagttcacgagcgatgatcgccgcgtgacaggtacgaccgccacggttggtgacgatggcagatgctttcttcatgatcggttcccagtccgggtcggtcatgtcagtaaccagcacgtcgccaggttcgatgcggttcatttcgctgatgtcatggatgactttcaccggacccgcaccgatgcgatgaccgatagcacggccttcggcgataatcttaccctgtgaatgcagcgtataacgctccatgacctgaccgcgtgagcgcacggtttccggacgcgcctgcacaatgaacagtttaccggtgtggccatctttcgcccactcaatatccatcgggcgaccgtagtgtttctcaatttgtacggcctgttttgccagttcctgcacttcttcgttggtcagcgagaagatgtcacgctgttcctgcggtacgtcttcgattttaacctgcttgccgtgctcctgggtcggcgcgtaaaccatgcggatttttttcgaccccatggtgcggcgcacgatagccgggcgattcgccgccagtgtcggtttatgcacgtaaaactcatccgggttaaccgcaccctgcacgaccatctcaccaaggccccatgcggaagtgataaacaccacctggtcaaagccggattcggtatcaatggagaacatcacgccagatgatgcgaggtcagagcgcaccatccgttgaacaccggcggagagcgccacaccacggtgatcgtaaccctggtgcacacgataagagatggcgcgatcgttaaacagagaagcaaatacatgtttcactgccacgagaacggcgtcaaaaccctgaacgttgaggaaggtttcctgctgaccggcaaaagaagcgtccggcatatcttctgcggtggcggaggagcgcaccgcaaaagaggcgttttcgtcatcggcggaaagctgtgcataggcttcgcggatggcgttttccagctcaggctggaagggagtgtcgataatccactggcggatttgcgcgcccgctttcgcaagctgagtaacatcgtcaatatccgttttatccagcagttcataaatgcgctggtttacgccgctttggtccagaaactggttaaacgcgtcggcggttgtggcgaaaccattcggaacggaaacacccattccggaaagattagtaatcatttcacccagggaggcatttttgcccccaaccctgtctacatcattcatgccgagttggttataccaaagcaccagcggtgacgagccattgttggacatcgaacaatccttttgtgataaatgaacggtttgagaaacacatttctgcgcatttatctttgcatatttaaccggatgaaaaaaacggtgaatcgttcaagcaaatatatttttttactttttaagactgatcccagcgttgcgcaaatctgctctcttcgacaatttccacataaaccatcggtataaacgaaaccataaaaatgaaatgctgttttcataaaaaataaaattgaaggttcattttataaaccagacataacgttctacgcttctgtgcgtttttaatttatgctttcatagaattatgtctgcatcacgggaagaacaaaatggataatgctgttgatcgccacgttttttatatttctgatggtacggcaataactgcggaggtattaggacacgcagtaatgtcacaatttcccgtcactatcagcagcatcacgctgccgtttgtcgaaaatgagagccgtgcacgggcagtgaaggatcagattgacgcaatttatcaccagacaggcgtgcgcccgctggtcttctactccatcgtgttgccggagattcgcgccatcatcttgcaaagtgaaggcttttgccaggatatcgttcaggcgctggttgccccgctacaacaagagatgaaactggatccaacgccgattgctcatcgtacccatggccttaaccctaataatctcaataaatatgatgcgcgcattgcggcgattgattacaccctcgcccacgatgacggcatttcgttgcgcaatctggaccaggctcaggtgatcctgctcggtgtttctcgctgtggtaaaacccccaccagtctgtatctggcaatgcagtttggtatccgcgcggcaaactacccctttattgccgacgatatggataatctggtgctacccgcgtcgctcaaaccgcttcagcataaattgttcggcctgactatcgacccggaacgtctggcggcgattcgcgaggaacgtcgggagaacagtcgctatgcctcgcttcgtcagtgcaggatggaagtcgcggaagtggaagccttgtaccgtaaaaatcagatcccgtggattaacagtaccaattattcggtagaagagattgccaccaagatcctcgatatcatgggccttagtcgccgaatgtactagagaactagtgcattagcttatttttttgttatcatgctaaccacccggcgaggtgtgacacacctcgcacttgaaatcagcagcgattggtttatcgtgatgcgcatcacttcccggcagtcctgccgtagaagcaacaaatttctgagacttgtaatgaacagaactgacgaactccgtactgcgcgtattgagagcctggtaacgcccgccgaactcgcgctacggtatcccgtaacgcctggcgtcgccacccatgtcaccgactcccgccgcagaattgaaaaaatactgaatggtgaagataagcgactgttggtcattattggcccctgctcgatccacgatctcaccgctgcaatggagtacgccacccgtctgcagtcgctgcgcaaccagtaccagtcacggctggaaatcgtaatgcgcacctattttgaaaaaccacgaactgttgtcggctggaaaggactaatctccgatccagatttaaacggcagctatcgggtaaatcacggtctggagctggcgcgcaaattacttttacaggtaaatgagctgggcgtcccaaccgcgaccgagttcctcgatatggtgaccggtcagtttattgctgatttaatcagttggggcgcgattggcgcacgtactaccgaaagtcagatccaccgcgaaatggcttcggcactctcctgtccggtaggttttaaaaatggtaccgatggcaatacgcggattgctgtggatgctatccgcgcagcccgcgccagccatatgttcctctcgccagacaaaaatggtcagatgaccatctatcagaccagcggcaacccgtatggccacattattatgcgtggcggcaaaaaaccgaattatcatgccgatgatatcgccgcagcctgcgatacgctgcacgagtttgatttacctgaacatctggtggtggatttcagccacggtaactgccagaagcagcaccgtcgccagttagaagtttgtgaggatatttgtcagcaaatccgcaatggctctacggcgattgctggaattatggcggaaagtttcctgcgcgaaggaacgcaaaaaatcgtcggcagtcagccgctcacttacggtcaatccattaccgacccgtgtctgggctgggaggataccgaacgcctggtcgaaaaactcgcctctgcggtagatacccgcttctgaatgcgtgcccattcctgacggaatgggcatttctgcgcaacttgttgtcttctcaacaaattactgcttgctctggtcagccataatattgataataagaatcattgttatatcaattattattaatttttatgcgttatacggatagcagaaaactcacgcctgaaacggatgccaatcacaagaccgcttccccgcagcctattcggcgaatttccagccagacactgttaggtccggatggcaaactgattatcgatcatgacgggcaagaatatctgctccgtaaaactcaggctggcaagctgctgttgaccaagtagcctttaactcgagcagctgacttccagccgtttaccccagtcaggtggacgactgacatagtcatcatctctgtcgctgaaaggatttcgcaacgcctcatgcaggcggtgcaattccgtcatatcacccttttctgccgcttcaatcgcccgttgcgccaaccagttgcgcaataccagagcggggttaacgctttgcatcagttgctgacgctcactatcgctaacctcgtcttgttgcaaacgcccccgataacgggcaaaccagtcatcaaatgccgcacgatcaataaactcatcacgtagcggtgacgccgcgctgtgctgctcggtcagactcagcatgcggaatgtgcgggtataatcgctgcgctctcgcgccatcagactgaataattcattcagtagcgcgttatcctctttttgctccgtcatgaagcccagtttctgccgcatccgttctccataatgcgtcaacaaaacctgctgatagctgtccagggcctcattcagggcatctacggcaacaaatggcgacaatgtctgcgccagacgctgtaaattccacaacgcgacggcaggttgattatcaaagctgtaacgcccttgatgatccgagtgattacaaataaaaccgggttcgtaatcatcaagaaaaccaaacggcccgtaatcaagcgtcagccccagcagcgacatgttgtcggtattcatcaccccatgagcaaagccgaccgtctgccattgggcaattaacgacgcggtacgtgcgacaacatcgctaaaccagagacggtatttgtcctcatcatctgcaagatgtgaccagtaatgacgaatagcaaagtcagctaactgacgaaccttttccgactcgcggcggtagtaaaaatgttcgaaatgaccaaagcgcagatgacttggtgccacacgcatcagcatcgcgcctggctccgccgtttcccgatacactggcgaatcgctggtgacgatacttaacgcgcgggtcgtcggaatgcccagataatgcatcgcctcactggcgagactttctcgtatcgtcgaacgtaaaaccgcccgtccatcacccattcgcgaataaggcgtcaggccagcacctttcagatgccagtccattgtagtgccatcagcaagcagttgttcgccgagtaaaatgccgcgcccatcacccagttggcccgcccagacgccgaactgatgaccactgtaaacctgcgccagtggtgacataccaggcagtagggcttcgccgccccagacacctgcgccatttttaaacagcgacgatggaatactcagcgtgttagccagttcggtattatgccaaatcagccgggcattatttaaaggcgtaggggaaagtgctgtataggtttctggcaattcatcgcgccagcgggtaacaaaagacagggtcatagatcctcctgtttgatagtgtagacggttactctcgtcttaaacaccagcaaacagaagggttatcgctgaaccaacgtcgttatctgatttatgggaacggcaggccacaggcatccctggagagcatggaaatcgaagggggtaatctgtgccaatatttctgccgtatcaatgcctcccgcaatgatgcaattgcaacaaggggaaatttgcgcctggatcgcacgaataaacggttcgaaggagcggtgcgtgatttgttgctgaataaaacttttatccagcatgacgcgggtgaaaagaccatcaaaaaccgctttcattgtgctattgcctgctcccaaattacctaacacaaggggatacacttgcgataaggataaaagaccgcgattatcttttccttcattgagatgcgggtaattctcattaatcaacagttcaataaacggatattttaatagttcgcctgcgtaattatccctctctaataataatgtagccacttgtggcgttaaattaagccaggcaaagagtttatgttgaataaaaaaatgttggcatgattttagtaattccaactgctctgaaaataattgccaatgttgctcctcggtaagttgcgctataacccgactcgtcgggatacgaaccgtaccatcttcactggagaaatgggtaattaactcaacgccgacaaggacttgctggttgtctcttatcggcaggaaatagcaatcagaatgataaagattctccaaaaaaatcttcatggtaaccgtccctctcgaaggatgtttttcagtatccggctaaaagggatgaggccataagacataacaattacagaaggagtaactttcatttgttccatgttaaccactttttcaggggtcctttttttagattatcctgattataaacgaataatccatttacggaatttttgtctgcaaaatactactgtattcaggagtaaatggacggcgatgtatcatcgccgtccatttttcgacatactagattcgtctcgcctgccagaaatttttctgccaatagacattatcaagtgaggaacgcatcactcccttgctggtagaggcgtggataaattggttgttggtatcgtaaatacctacatgcaaaccattttgtccggaccccgttttgaaaaagaccaggtcacctggcagcaactcgtctttatcaatttgcgtgccaatagaggcttgttgtttggtttcacggggcagctgcaaatcgaaacgatcgcgcatcgtcacaaccacaaatcccgaacagtccacaccgcgccgcgtcatgccaccataacgatacggcgtgccatgccagctttgtagctggtcgttcaaaccggcaataacggtaatcgaatcagaaagtctggcatttggcggcggtgctttatggtggctacacccggccagaagcagtgctgtgatcaaaataaggcagaaacgcattccgtacggttcctctgttttttattcttgcattaatttagcgtcgtaattacccgattttcaagatactaatgaaatcagatggtcgaaatcagcattctgtgaccttcgatatccagacggcgaaaattcatcccataggcctgcgccagatttggcggcgtgagcacctcttccctgcgtccactggccagcatttttccaccttttagcaaccacgcccgatgcgcatgacgcaatgtgtggttgagatcgtgactgctcatcacaatcgccagtccttgctgacacagcgcgctcagaattttgtctaacgcactttgttgcgcaacatcaagactgttcatcggctcatcaagaagcagcaattggcctgcgggattggcttgtggtgtgatttgcaacaccaccgcagcaagacgtacgcgttgccattcaccgccggaaagttgattggtgctacgtccgagtttgtcatcaagagccagcgcccctgcgacatcattcagtagttcggtacgcgttttatcgtgctgatgcagtgtcaggtagtgccagaccggcgttgcaaacggcggcgtctgctgttgtgaaagataggcgcgatgcagcgcgagttttgttgcggaccatgcttccagtggttgccccgcgaactgaatgcttcccttaccgctggtcattccggccattcgcgccagtaaggtactcttacccgcgccattcggccccaccaggtgcaggatctccccagcccgaacctcgccagaaagcggccccaggcgggtagattccgcaacatcttgtaactgcatcacaatagacattattttgccaacgccagtttaatgctttccatcacaatgggatcttccggcgtcatatccggggaaaaacgctggatgacttttccgtccctgccaaccaggaatttttcaaaattccataaaatatcatccgggtacagcggtgcacggcctttgctgaccatacgggcatagaatccgctctcttccggcgcgactgcggtcggcgctgcggcaatcaatttttgatacagcggatggcgtccttcgccattaacttcaatcttactgaacatcgggaacgtcaccccccatgtggtggtacagtaagttttaatctcttcatcgctgcccggttcttgttccagaaactggttgcacgggaatcccagcaccataaaacctcgatcgacccaggctttctgaatattctccaactgctcatattgcggcgttaagccacactttgaggcgacattgacaatcaacagcacattaccggcgaacttctccagcgtggtcacttcaccgtcgatatctttcactacggtcgtcagaatggaatcttgcatcgtttctcctgggtgtggtcagtaaaaatcttagcttttaatcatagaccgtctttttgcggctaacgtcctgcttttaacaataaccagataaacaccggcgcacctaacgttgcggtgaccacgccaataggcagctctgcggcagctaatgccaggcgcgctacaatatcggccagcagcaatgcgctcgcccctgccagcgcgcagccgggaagtaatacgcgatgatcggttaaaccacacaaccggagaatatgggggatcaccagaccaataaagccgatagcacccgccagcgccacactgacgccaaccatccagccggtcgctgccaccagcacattgcgccagaaccacaggggtaaacccagttgccgcgccgagatctcgccaagtgctaacatattcatcggcctggactgacaacagatccacaacaacacggggatcaatgccagcatcagccagctttgccgccagtctacgccgccaaaaccgcccatcatccagtacatcagctgacgcaaatcaactgaggtggaaaagtagatagcccacgtcattagtgcgctacagataatccctaatgcaacgccagccagcaataaccgactggtcgaaagatgacgacgggcgaaacgtaagagtattaaagtgatgataagcgcgccagcaatcgcacacagccctagcgcccagttggggagttgcccttgcccaagcaataccgcggcgataagccccacgcctgcgccgttagagacgccaagtagtccaggttctgccagaggattttcaaacaacgcctgcattacagcgccggatatagccagcgccgcaccaaccagcaatacagccagcgtacgtggcaggcgaatttgccagacgaacagttcgccacgaggagtaaaccagtcacctggcgagatccattgttcaccggcgcaaaggcttaagagaagcgccagcagcatcaaaactgacaggcataataaccagcgaatattttgtcgctgttgttggcgggcaagtgtcagcatggtatccgttctgctgaagtgtcatggcgttgattttacggtgactcttcgacagtgaaaagaaaaaaggccgcagagcggcctttttagttagatcagattactcgtctttgggcgaagcgttttcgacccggctttttaacttctgcccgggtctgaaggtcaccacgcgccgtgctgtaatgggaatatcctcgcccgttttcgggttacgtcccgggcgttgattcttatcacgcagatcgaagttaccaaaaccagagagtttcacctgttcgccgttttccagagcgcgacggatctcttcgaaaaacagttcaaccagttctttggcatcccgcttgctaagcccaagcttatcaaacagatattctgacatttcagcttttgtaagcgccataggttcaatccctcaatgatgcctggaatcgctcttttaatgcctctacacatttggcgacggtagcggcaatctcctcttcttcgagtgtacggctggtatcttgcaggatcaggcttatggcgaggctcttatacccctccgcaacacccttaccgcggtacacgtcaaataagtttacgccaactacctgatttacgccaactttcttacattcggataaaatatccgctgcgggaacgttttctgcgaccaccaccgcgatgtcacgacggttcgccgggaagcgagaaatctcgcgcgcctgaggcaccacgcggtctgcgagcttgttccactccagttcgaacaccagagtgcgaccgttaagatccagtttacgttccagttcaggatgaacaaccccaacaaaaccaatacgttcacctttcagataaatcgctgcggattgccccggatgcagtgccggattcgcttctgcacggaactcaacctcattcagtttaccggtcaggtcgagaacggattcaagatcgcctttcaaatcatagaaatcaacggtctcttttgccaggttccagtgctcttcgtaacggttaccgcaaatcacaccggctaacatcagatcctgacgaatgcccaacggtgcctgagtatctggtacgaaacgcagaccgctttcgaaaatgcgcacacggttctgctgacggttctggttgtacaccacggttgccagcaggccagtccacagagaaagacgcattgctgacatttcaacagagatcgggcttggcagcagtaaggcttcaacgcctggatggatcatctgctgcactttcggatcaacgaagctgtaggtgatcacttcctgatagcctttgtcgttgagcagcgttttcacgcgcttgagcgacaggtcagcttcacggtgagtacccataatcaggcttgcctgtaccggctcatccgggatgttgttgtagccgtaaacacgcgcgacttcttcaaccagatcttcttcaatctccatatcgaaacgccagctcggcgcaactgcctgccattcgtctttgccttcggtcacttcgcagccgagacgacgcagaatgtcagttacctgctcatccgcaatatgatggccgatcaggcgatccagtttgctacgacgtagagtgatggttgcacgcttcggcagcgttgcttcgttggtgatatcaattaccgggccagcctcaccaccgcagatgtcgatcagcagacgggtcgcacgttccatcgctttgtgctgcagtgccggatcaacgccacgctcataacggtgagacgcatcggtatgcaggccatgacgacgagcacgaccggtgatagacagcgggctaaagaacgcgcattccagcagcacgttttgtgtttcgtcattcacgccagagtgttcgccaccgaagatgccgcccatcgccagcgccttgttgtggtcggcgatgaccagagtgtcagcattcagcttcgcttcagtaccgtcgagcagcaccagcgtttcgccctctttcgccatccgcaccacaatgccgccttcaatgcgatctttatcgaaagcgtgcatcggctggcccagttcgagcagcacatagttggtgacgtcaacaactgcatcgatagaacggatcccgcaacgacgcagtttttctttcatccacagcggagttggcgctttaacgttaatgccttttaccacacggccaagataacgcgggcaggcttccggcgcttcgactgtaatcggcagcgtgtcgtcgatggtcgcaccaaccggaacgatttccggttgaaccagcggcagctggttcagcacggcaacgtcacgcgcaacaccaatgatgcctaagcagtcggcacggtttggcgtcacgctgatttcgatggtgttgtcatcaagtttcaggtattcacggatatcggtgccaatcggcgcatccgcaggcagttcgataatgccgctgtgatcgtcagaaatgcccagttcagagaaggagcacagcatcccttcagacggttcgccacgcagtttcgccgctttaattttgaaatcacccggcagaacagcaccaatggtcgctaccgctacacgcaggccctgacggcagtttggcgcaccgcagacgatgtccagcaggcgatcgccgccgacattcacttttgtcacacgcagtttgtcagcgttcggatgctgcgcacactcaaccacttcaccaacgaccacgccgtggaagctgccggcaaccggttctacaccgtcaacttccaggcccgccatagtgatttgatttgccagcgcatcgctatcaatcgccgggttcacccattcgcgtaaccacagttcactgaatttcataatctattcctgccttatttaaactgtttgaggaaacgcagatcgttttcgaagaatgaacgcaggtcggtgacgccgtaacgcaacatagtcagacgctccatccccatcccgaaggcgaaaccagagtaaacttccgggtcgatgccaacgttacgcaacacgttcggatgcaccatcccgcagcccagcacttccagccatttaccgtttttacccatgacgtccacttctgcagaaggttcggtaaacgggaagtaggaaggacggaagcgaatctgcaaatcttcctcaaagaagttacgcaggaagtcgtgcagcgtgcctttcaggttggtaaagctgatgttggtatcaacaatcagaccttccatctgatggaacatcggcgtgtgagtctggtcgtagtcgttacgataaacacggccaggcgcgatgatacgaatcggtggctgctgggctttcatggtgcggatctgtacgccagaggtctgggtacgcagcaggcgggtagtgtcaaaccagaaagtgtcgtggtcagcgcgcgccgggtggtgaccaggaatgttcagagcatcgaagttatgataatcgtcttcgatttccggcccggttgccacggtaaagccaagctcaccgaagaaactttcgatacggtcgatggtacgggtaaccggatgcagaccgccgttttcaatgcgacgacctggcagagagacatcaatcgtttccgccgccagacgcgcattcagtgcagcgctttccagttccgctttacgcgcattcagcgcctgctgaacctgctctttcgcttcgttgataaccgcaccagctgccggacgctcttctggcggcagctcacgcagggtcgtcatctgaagggttaagtgcccttttttacccaaatattcgacgcgcacattatctaacgcggcaacatctgacgcctggctaatggccgccttcgcactggcaaccagttctgcgagatgtgacatggttttcctcattgtgtcagtggtgacactggttcgttggacttagagcctatcccatcaggctattttacttgccattttggtcccgggctgtgctcgaaattctcacgtacttaaatacgctccggtttctccgcgctggccgtgtccagtctggctgcgacaattacacctgatgagacaggctttttatttttcaaaacgcgcatacaaaaaaagcctccactgggaggctttcaggcgctgttttccgtttctcttctcacgcgctagcctcctggattcaggtgctaaagtaaaaaaagaagcggaaaatagcagcattcattgcttgcgttaccttttggtactcttcaaaagacctttattgaaaaggctacggcgataaaagtcaatgttttgatggcgttgaaacgaaaagagggagactagctccctctttcaactggcttatgccagagctgctttcgctttttcaaccagagcggtgaacgctactttgtcgaatactgcgatatcagccaggatcttacggtcgatttcaacagaggcttttttcaggccattgatgaatttgctgtaagaaataccgttctgacgtgctgctgcgttgatacgcgcaatccacagttgacggaactgacgcttacgttgacgacggtcacggtaagcatactgaccagctttgataacagcctggaaggcaacgcggtatacgcgagaacgcgcaccgtagtagcctttagcttgtttcaaaattttcttgtgacgtgcacgtgcaataacaccacgttttacgcgagccatatgtgctctcctgtatctatattctaattaaaaagttaaaaacgttaacggcttatgcgtacggcaggcacgcgattaccaggcccagatcgcctttggaaaccatggctttcggacgcaggtgacgtttacgtttggtcgcttttttggtcagaatgtgacgcaggttagcgtgcttgtgcttaaaaccacctttaccggtttttttgaagcgcttagcagcaccgcgtacggtcttaatttttggcattttaataacttccacttcgcattgttaataaacgaaacaaaggcgaacaaagcctgtgaagcccgaaggctccacagacagtgctacttgaaggccttactgtttcttcttaggagcgagcaccatgatcatctggcggccttcgatcttcgttgggaaggattcgaccactgccagttcttgcaaatcgtctttcacgcgattaagcacttccataccgatttgctggtgcgccatctcacgaccgcggaaacgcagcgtgattttggctttatcaccctcttcgagaaagcgaatcaggctgcggagttttacctgatagtcgccttcatctgtaccaggacggaatttaatttccttaacctggataactttttgctttttcttctgttccttagaagacttgctcttttcatagaggaatttgccgtaatccattatacgacaaaccggcggctcggcgttagggctgatctcgactaagtctactccggcttcttctgctttctccagagcttctctcagactcacaataccaagctgctcgccttccagacctgttaagcgaacttcctgggcgcgaatttcgccattgatacggttagggcgcgccgtttgaactcgttttccgcctttaataccttattcctccaattgtttaagactgcggctgcgaatctcttgttgcagcttctcgatcacttcatttacgtccatgcttcccaggtctttaccacggcgggtgcgaacggcaactttgcctgattccacctctttatcaccacagaccagcatatatgggacgcgacgcaaagtgtgctcgcggattttaaagccaatcttctcatttctcaagtctgctttaacacgaatgcccgcatttgatagtttttgcgtcaattcgttaacgtattcagactgtgaatcggtaatattcatgataacaacctgaaccggcgcaagccaggtcgggaagaaaccagcgaactcttcggtcaggataccgatgaaacgttccatcgaccccagaattgcgcggtgaatcattaccggtactttacgttcattgtcttcgcctacataagaagcgctcagacgagacggcaaagagaagtccagctgtactgtaccgcactgccatgcacgatcgaggcagtcatacagggtaaattcaattttcggaccgtagaaagcgccttcacccagttgatattcaaacgggatgttgttttcttccagcgcaaccgccaggtccgcctcagcacgatcccacatttcgtcgctgccaatacgtttttcaggacgagtggagagtttgacgacgatcttctcgaagccaaaagtgctgtacatatcatagactaaacggatacatccgttaacttcatcgcgaatttgttcttcagtacagaagatatgcgcgtcatcctgggtaaatccacgcacgcgcatcaggccatgcagcgaacctgacggctcgttacggtggcagctaccaaactcggccatacgcagcggcagatcgcgataagacttcagcccctggttgaaaatttgtacgtgacccgggcagttcatcggcttaatgcagtattcacggttctcagaagatgtggtgaacattgcatctttgtagttgtcccagtgaccggttttttcccacaggacacggtccatcatgaacggacctttaacttcctgatactggtactctttcagtttagaacgaacaaacacttccagttcacggaagatggtccagccgtcgttgtgccagaataccatacccggcgcttcttcctgcatatggtacaggtcgagctgtttaccgattttacggtggtcgcgtttcgcggcttcttccaggcgctgcaggtaagcgttaagtgcttttttgtctgcccacgccgtaccgtaaatacgttgcaacattttgttgttgctgtcgccacgccagtaagcccctgccgttttcattagtttgaaatgatggcagaaacgcatgttcggtacgtgcggaccgcggcacatatcgacatattcttcatggaagtacagacctggcttgtcatcatgggcgatgttttcgtcaagaatggagactttgtagctctccccacggttggcgaaagtttcacgcgcttcgtgccagctgactttcttcttaatgacgtcgtagtttttctcagcaagctcatgcatccgcttctcgagtgcttcgacatcttcctgggttaacgtgcggtcaagatcaacgtcgtaataaaaaccgttgtcaataaccgggccgattgccattttggtatgcggccaaagttgtttaatcgcgtgccctaacaggtgcgcacaggagtgacgaatgatctccagaccttcttcgtctttggcggtaatgatcgacagttgtgcgtcgttttcaatcagatcgcaagcatcaaccagttcgccattaacgcgccctgcgatacaggctttcgccagacctggaccaatgtccagcgcaacatccatggggcttacagcgtgatcgtaatggcgttggctgccatcaggaagagttataacaggcattttatatccttatttgcagtggtgacccacacgaaagatcacatacaaagaaaaatttgtttattaacagttcattgcgaaaccatctagccaacaaatgctaaattggttcgcaatcaggtacacaaatgaaagacattaacctctcaccttccacccggttgagcgatgttaacactaaaaaaagggagattgtacctttccgtttcacattgattcgattcgcaattcgtttgtagtgagtacaccagcaaaacgcttaaagaacaactgataacatcacggtgcgtctgaaaggtttactgcgagcggatttacagcagcataaactgaatccagcaaagttcgttgcgtgatttggcggtagtattttaaacgctcatgagattaatgacgaagtggtcatatcacaatgataaaagtgacacaattcttataacaatttttcgtgcacatttcgttctggcgataataattaatcatcatcctcaaaacctccagatatatataaggcgaacagattatgagtcaaaacgatatcattatcagaactcattataagtctcctcatagattgcacatcgatagcgacataccaacaccttcatcagagcctattaatcaatttgcgcgccagctcatcaccctacttgatacctctgacttaagttcgatgctgtcatactgtgttactcaggaatttaccgcaaactgtcgaaaaatatcacaaaattgttattccactgccctttttaccattaactttgccacttcacccatccatacagaaaatatactcattacattacactataaaaaagaaatcatttccttattactggaaaccacgcctattaaagctaaccatttgcgaagcatactggattatattgaacaggaacagttaactgctgaagatcgtaaccattgtatgaaactgtctaaaaaaatccatagagaaaaaaactatacacccaacagtaaatctcaatggtagtgcatgttttttgcaatctccttctgacgctattttttgtcgccatctgtcattgcaatacgcccttgattcattgagaaatggaaaaggcaaagtcaacctgattaaacattactcctccgttgaatccatacagcagcatgtccccttagtccgggacgcggagttcagagcattacttcgccatcctcctgcagggagtcgcgttatcgcgagtaaggattttggcttcgctttagatattttcttttgtcgaatgatggcaaacaatgtcagtcatatgtccgcgattttatatatagacaatcatactttgtcagtaaggctacgaataaagcagtcagtgtatggacaattaaattatgttgtgtccgtttacgacccgaacgataccaacgttgccgtcagagacacccacaggacagcacggggctttctttcgcttgataagttcatcagttcaggtcccgatgctcagacctgggctgatagatatgttcgcaactgtgcaattgctattctgcccctattacctgtgggagttccaggggctattttcgcgggtattgcatcacgaatgccatttgcccctatacatccatcggcaatgttgttaataatggctacaggccagtctcaacagcttattacattattcaaacagttgcccatactccctgaaaaagaaatcattgaaataataactgcgcagaatagcgttggtacacctgctttatttttggctatgatgaacggacatactgacaacgtgaaaatatttatgcaagaaattcagtcactggtagataatcacatcattcatgaagataatctggttaaattactgcaaactaaaagtgctaacgaaacacctggactttatatctccatgttgtatggattcgatgaaataatcgatatctttctgaatgcattaaccactccaatagcacaagagcttttaaacaaaaaactggtgatgagtattttagccatgaaaatacatgatggtgagccaggattatacgccgcaatggaaaataatcaccctttgtgtgtcacacggttcctctctaaaattaatggcatcgcctttaaatacaagttgagcaaagctaacatcatggatttattaaaaggagctacagcacagggaacccctgcattatacatcgccatgagcaagggtaatgaagacgtcgtgttatcttatatatcgacgctgggtgcttttgcaaaaaaacattcttttagtcaacatcagttatttacactattggccgctaaaaatcatgacaacatgtcagctgttcatatagccattcatcataagcattataaaactgtagaaacatattatgctgctattaatgcaatcagccaaagcctgagttttagtgctgatgaaataaagacgtatttataaccagctatttacgatatatatcgatacataattttatttttttcataaaacgcagaaacagtgaccatgtgcacaacgccacccgacggctgtaataacaaaaaatcccttgatgcctgtcccttttgttacactccgttatcacgcacaagagatatgcaggacactggtatgccgactaaacgctttgataaaaaacactggaagatggtggtggtgctactggcaatctgtggcgctatgttgttgctacgttgggcagcaatgatttggggctgagcagtgacaaacgaagacagccagaccgcataacacggtccggcagataattttacatgctgtagcccagcgataaggttgtccgacggtcggtatgttccggtgcagactctggaggttcagagttccatgtgacgttgtaagccaccttcagtccaaaatgttcattaatagcaacatttaatgcgctttcggagttcagcgttgtgtcttccgcgccaaagaccgaaacaccctgcgtaaatttagcgttgtcagtcaactgccatgcataagccccggaggcatagcccagcggctgggtttcactggcattgtcggtatatttgtcgtaacgcacacctggaccgaattcaaagcggaaactgtgtaccgggccattcaaaaactgacgaccataacccgcggtcaacacatcgcgctctcgatagccgttataacggtctgtcagccagcttgcctgaccaaataaatagtcataatcagttaaattaaaacggctacgcccgcccgccgcatatttttctgaagaacgctcatcattagaagaagtattactggcgttcccccacagcgaccaggcagtggtgtgtccataccaggtcatggtggtgtcagccgtaagtgaggagcttttcgtattgcctgattgtgcaagatatcctgcgttcagattaccttcgaaaggttttttagcgctggcaggatcatccatgacagtaaaaacggaatcatcggcagctgcattcagtgacgcaaacatgccccccgccaacataacgatggcaggaactgtcttcaaaagcttcatttatcaagagtccgtacaacaaaaaaagagaccatcgcggtcccggaaactttcttaaggatcaaagattagcgtccctggaaaggtaacgaattataaaaaggcgcgaataacttagcaatgtattcttatttcattttttgaataagcatgtggcgaaaacagatttttatttatatatatttatctgcaaaattttaaataaagctccaataaatcatattgttaatttcttcactttccgctgattcggtgccagactgaaatcagcctataggaggaaatgatggtacgtatctatacgttgacacttgcgccctctctcgatagcgcaacaattaccccgcaaatttatcccgaaggaaaactgcgctgtaccgcaccggtgttcgaacccgggggcggcggcatcaacgtcgcccgcgccattgcccatcttggaggcagtgccacagcgatcttcccggcgggtggcgcgaccggcgaacacctggtttcactgttggcggatgaaaatgtccccgtcgctactgtagaagccaaagactggacccggcagaatttacacgtacatgtggaagcaagcggtgagcagtatcgttttgttatgccaggcgcggcattaaatgaagatgagtttcgccagcttgaagagcaagttctggaaattgaatccggggccatcctggtcataagcggaagcctgccgccaggtgtgaagctggaaaaattaacccaactgatttccgctgcgcaaaaacaagggatccgctgcatcgtcgacagttctggcgaagcgttaagtgcagcactggcaattggtaacatcgagttggttaagcctaaccaaaaagaactcagtgcgctggtgaatcgcgaactcacccagccggacgatgtccgcaaagccgcgcaggaaatcgttaatagcggcaaggccaaacgggttgtcgtttccctgggtccacaaggagcgctgggtgttgatagtgaaaactgtattcaggtggtgccaccaccggtgaaaagccagagtaccgttggcgctggtgacagcatggtcggcgcgatgacactgaaactggcagaaaatgcctctcttgaagagatggttcgttttggcgtagctgcggggagtgcagccacactcaatcagggaacacgtctgtgctcccatgacgatacgcaaaaaatttacgcttacctttcccgctaacaaaaacattcccccagcattgggggaatcatcaccaacctgtcggcaacgcgtttctccgactatgctcaaaagtcatgtgataacaaaggggtgaactatggccagtggcgatcttgtccgttatgtcataaccgtcatgttgcatgaggatacattgactgaaattaacgagttgaataattacctgactcgcgacggttttttgctcactatgacggatgatgagggaaatatccatgagctgggaactaacacttttggacttatcagtacccaaagtgaagaagaaattagagaactggtttcggggcttacccaaagtgcaaccggcaaagatcctgaaatcaccatcacgacctgggaggaatggaatagcaacagaaaataaatggtttttgggcaataatcagtctgtggtgtgcgttagctcgtgtttttacaccgcattcttgcgctaaccttatgatctggcagacaacatgggagagacatcatgtggcaggcaatcagtcgtcttttgagcgagcagttaggtgaaggcgaaatcgaactgcgtaatgaactgcctggcggagaagtccatgccgcatggcatttgcgctatgcaggacatgattttttcgtcaaatgtgatgaaagggaactgcttcccggttttaccgccgaagccgaccaactggagttactgtcgcgtagtaaaaccgtcaccgtgcctaaggtttgggcagttggcgctgaccgtgactacagttttctggtgatggattatctcccacctcgtccgctggatgcgcatagcgcatttattcttggtcagcaaattgcgcgtttacatcaatggagcgaccaaccacaatttggccttgatttcgataacgcgctctccacaactccacagcccaacacctggcaacgtcgctggtcaacgttttttgctgaacaacggattggctggcagttggaactggctgcagaaaaagggatcgctttcggcaatatcgacgccatcgtcgagcatattcagcagcgtctggcctcacatcaaccgcagccttctctgttgcacggcgatttatggtccggcaactgtgcactgggtccggatggcccgtacattttcgacccggcctgctactggggtgaccgagagtgcgacctggcgatgttaccgctgcatactgaacagccgccacaaatctatgacggctatcagtcagtatccccgctacctgccgatttccttgaacgtcaaccggtttaccaactctacacgctgttaaatcgtgcaaggttatttggcggtcagcatttggttattgctcagcagtcattggatagattattagcagcatgatatgggttgaggataatggccgctccgtgcggccttttgattaaataaacccaagcagagaaaagaacacataacctgcagcaatacaaataaccggcaggatatacagtgagaaaaactgcaggaaaatagtatggtgcggaacaacaatacgggactcaatttgttcacgcgttagcccctcttcccctttggctttttccagaatgagttgatcttcaacaccttcccgcaagaagcgcgcctggcgactcatccgggcaccggaatcctgcaacgccagtccgacaaaaatcaggatgaaaatcacccagaacataacgttcacgccaccattaaaattgggcgtcggggagttataccagaatagattcaaaaaaggcgtattcgcctgcatcatatcgatcatgacatgagtaaagtcgagcatgaccgcattaatgccttccttgttttcctgccgggtattcataaatttcagcaaagaaatcaatgtagagatcaatgcaggtataaaaatcacccaacccaaaatccttttcaaaacagcaatgcgtccagcttgttgatacgtcatgagttctccttgattaagacgcgtcgtttcacttagtttacctgtagatatctgttttcgcccattctttaaaggcgatatgataggcgcttaatcataagcacggcttaataccttacacataatgctctaaaggagaggttgtaatgtcaaccccgcgtcagattcttgctgcaatttttgatatggatggattacttatcgactcagaacctttatgggatcgagccgaactggatgtgatggcaagcctgggggtggatatctcccgtcgtaacgagctgccggacaccttaggtttacgcatcgatatggtggtcgatctttggtacgcccggcaaccgtggaatgggccaagccgtcaggaagtagtagaacgggttattgcccgtgccatttcactggttgaagagacacgtccattattaccaggcgtgcgcgaagccgttgcgttatgcaaagaacaaggtttattggtgggactggcctccgcgtcaccactacatatgctggaaaaagtgttgaccatgtttgacttacgcgacagtttcgatgccctcgcctcggccgaaaaactgccttacagcaagccgcatccgcaagtatatctcgactgcgcagcaaaactgggcgttgaccctctgacctgcgtagcgctggaagattcggtaaatggcatgatcgcctctaaagcagcccgcatgcgttccatcgtcgttcctgcgccagaagcgcaaaatgatccacgttttgtattagcagacgtcaaactttcatcgctgacagaactcaccgcaaaagaccttctcggttaatgaccaggggcagtgatctcgctgcccctggttctttatctgaaattgcattcaactgacggattaatcgtcaatttaagagaaagagttacaccgtcaccacttccgtgcactgtataaaaatcctatactgtacgtatcgacagtttagtgagttttatcatgacggcggaaggtcaccttctcttttctattgcttgtgcggtatttgccaaaaatgccgagctgacgcccgtgctggcacagggtgactggtggcatattgtcccttccgcaatcctgacgtgtttgttaccggacatcgatcacccaaagtcgtttcttgggcagcgattaaaatggatatcaaaaccgatcgcccgcgcttttgggcatcgtggttttacccacagtctgctggcggtatttgcgctgctggcaaccttttaccttaaggttccggaaggctggttcattccggctgatgcgctacaaggaatggtgctgggttatttgagccacatacttgccgatatgctgacacccgccggtgttcccctgctctggccatgccgctggcgtttccgcttgcctatcctggttccccaaaagggcaaccaactggaacgttttatctgcatggcattatttgtctggtcggtatggatgccccattcattacccgagaacagcgctgttcgttggtcatcgcaaatgatcaataccttgcagatccagtttcatcggcttattaagcatcaggttgaatactaaaaaggcaaaaatcacctttctggaataagcaattccatttgaatataagagccagctcacagttctgttaatcttgcgccaacactatgactgctacgcagtgatagaaataataagatcaggagaacggggatgaactttccattaattgcgaacatcgtggtgttcgttgtactgctgtttgcgctggctcagacccgccataaacagtggagtctggcgaaaaaagtgctggtgggtctggtgatgggtgtggtttttggccttgccctgcataccatttatggttctgacagccaggtacttaaagattctgtacagtggtttaacatcgttggtaacggctatgttcaactgctgcaaatgatcgttatgccgttagtcttcgcctctattctgagcgcggttgcccgtctgcataacgcatctcagttaggcaaaatcagttttctgaccatcggtacgcttttgtttaccacgctgattgcggcgctggtcggtgtgctggtcaccaacctgtttggtttgacggctgaaggtctggttcagggtggtgcagaaactgcacgtctgaacgccattgaaagtaactatgttggtaaagtctctgatctgagcgttccgcagctggtcttgtcctttatcccgaaaaacccgtttgccgatcttaccggagccaatccgacgtcaattatcagcgtggtaatttttgccgcattcctcggcgtagctgcattgaaactgctgaaggatgatgcgccgaaaggtgaacgcgtcttagccgctatcgataccctacaaagctgggtgatgaaactggttcgcctggtcatgcagttgaccccttacggcgttctggctctaatgaccaaagtggttgcaggttctaacttgcaagacatcatcaaactgggaagtttcgttgtcgcgtcctacctcggtctgctgattatgtttgcagtgcatggcattctgctgggcattaatggcgtgagtccgctgaagtacttccgtaaggtatggcctgtgctgacgtttgcctttaccagccgttccagtgctgcgtctatcccactgaatgtggaagcacaaacgcgtcgtctgggcgttcctgaatccatcgccagtttcgccgcctctttcggtgcaaccattggtcagaacggctgcgccggtttgtatccggcaatgctggcggtgatggttgcgcctacggttggcattaacccgctggacccgatgtggattgcgacgctggtcggtattgttaccgttagttccgcaggcgttgccggtgtcggtggtggtgcaactttcgccgcactgattgtactgcctgcgatgggcctgccagtaaccctggtggcgctgttaatctccgttgaaccgcttatcgacatgggccgtacggcgttaaacgttagtggctcgatgacagctggcacgctgaccagccagtggctgaagcaaaccgataaagccattctggatagcgaagacgacgccgaactggcacaccattaattcttatgctggcaacggtccgttttgtataggggccgttgccttactttttaaatgttccatcgcggcgatgcatactgactcatatttaaacagatcgtcagcgaaaaaaatgtccaacttatcaatacattcctggctcaatgaatgtgcctgtagcgagaagcttaaaacctcatacccgagacgttttctaagtgaactatctggaatactcataatatcttcaagcacaccacttcccattcccggaagatttagtggattaaaaagaagattgatattaagcattgatattatcgaaggaaactttaggagactctcatttttttgaatcgcagcaaaaatgctcccgacaggatgtatataattttgttcatagtatatagtccttaaatagtgaataaccaacctgttttttatactgatcaaattggtcattttttctgggcgaaatacagaagtgacatccattccaataaaatctttatttatacctcttatccgaatttcactaccataaagattattaattattactctatatttaacattgtcctgcagatatgtatcaaaactaagtgctggcgctcctggctttgaggcatcatagttaatgttagacatataggcaatcatataattaaagtttgattctgctatttcatcgcagtcacattgacccgttgatataaagaaagtgagtgctgtcatagtagactgcagcctttctttaaaagagtcgaaagccaggcttttaatatttaaatcaccataattactctgtattaagtttgtagaaaacatctcccgcctcatattgttaacaaaattattatctcatttaaatctaagtcatttacaatataagtttaagagcgacgccacaggatgaactatcaaaaatagctcatcatgattagcaaaacttaaccattttaaaataaataaacaattaaagaaaaaagatcacttatttatagcaatagatcgtcaaaggcagctttttgttacaggtggtttgaatgaatgtagcaacgaaatacagaatttcaggtcatgtaactcccggcaaaaccgggaggtatgtaatccttactcagtcacttccccttcctggcggatctgatttgcccaacgttgggcagattcaggcacagtaaacgccggtgagcgcagaaatgactctcccatcagtacaaacgcaacatatttgccacgcagcatccagacatcacgaaacgaatccatctttatcgcatgttctggcggcgcgggttccgtgcgtgggacatagctaataatctggcggttttgctggcggagcggtttcttcattactggcttcactaaacgcatattaaaaatcagaaaaactgtagtttagccgatttagcccctgtacgtcccgctttgcgtgtatttcataacaccgtttccagaatagtctccgaagcgggatctggctggtggtctatagttagagagttttttgaccaaaacagcggccctttcagtaataaattaaggagacgagttcaatgtcgcaacataacgaaaagaacccacatcagcaccagtcaccactacacgattccagcgaagcgaaaccggggatggactcactggcacctgaggacggctctcatcgtccagcggctgaaccaacaccgccaggtgcacaacctaccgccccagggagcctgaaagcccctgatacgcgtaacgaaaaacttaattctctggaagacgtacgcaaaggcagtgaaaattatgcgctgaccactaatcagggcgtgcgcatcgccgacgatcaaaactcactgcgtgccggtagccgtggtccaacgctgctggaagattttattctgcgcgagaaaatcacccactttgaccatgagcgcattccggaacgtattgttcatgcacgcggatcagccgctcacggttatttccagccatataaaagcttaagcgatattaccaaagcggatttcctctcagatccgaacaaaatcaccccagtatttgtacgtttctctaccgttcagggtggtgctggctctgctgataccgtgcgtgatatccgtggctttgccaccaagttctataccgaagagggtatttttgacctcgttggcaataacacgccaatcttctttatccaggatgcgcataaattccccgattttgttcatgcggtaaaaccagaaccgcactgggcaattccacaagggcaaagtgcccacgatactttctgggattatgtttctctgcaacctgaaactctgcacaacgtgatgtgggcgatgtcggatcgcggcatcccccgcagttaccgcaccatggaaggcttcggtattcacaccttccgcctgattaatgccgaagggaaggcaacgtttgtacgtttccactggaaaccactggcaggtaaagcctcactcgtttgggatgaagcacaaaaactcaccggacgtgacccggacttccaccgccgcgagttgtgggaagccattgaagcaggcgattttccggaatacgaactgggcttccagttgattcctgaagaagatgaattcaagttcgacttcgatcttctcgatccaaccaaacttatcccggaagaactggtgcccgttcagcgtgtcggcaaaatggtgctcaatcgcaacccggataacttctttgctgaaaacgaacaggcggctttccatcctgggcatatcgtgccgggactggacttcaccaacgatccgctgttgcagggacgtttgttctcctataccgatacacaaatcagtcgtcttggtgggccgaatttccatgagattccgattaaccgtccgacctgcccttaccataatttccagcgtgacggcatgcatcgcatggggatcgacactaacccggcgaattacgaaccgaactcgattaacgataactggccgcgcgaaacaccgccggggccgaaacgcggcggttttgaatcataccaggagcgcgtggaaggcaataaagttcgcgagcgcagcccatcgtttggcgaatattattcccatccgcgtctgttctggctaagtcagacgccatttgagcagcgccatattgtcgatggtttcagttttgagttaagcaaagtcgttcgtccgtatattcgtgagcgcgttgttgaccagctggcgcatattgatctcactctggcccaggcggtggcgaaaaatctcggtatcgaactgactgacgaccagctgaatatcaccccacctccggacgtcaacggtctgaaaaaggatccatccttaagtttgtacgccattcctgacggtgatgtgaaaggtcgcgtggtagcgattttacttaatgatgaagtgagatcggcagaccttctggccattctcaaggcgctgaaggccaaaggcgttcatgccaaactgctctactcccgaatgggtgaagtgactgcggatgacggtacggtgttgcctatagccgctacctttgccggtgcaccttcgctgacggtcgatgcggtcattgtcccttgcggcaatatcgcggatatcgctgacaacggcgatgccaactactacctgatggaagcctacaaacaccttaaaccgattgcgctggcgggtgacgcgcgcaagtttaaagcaacaatcaagatcgctgaccagggtgaagaagggattgtggaagctgacagcgctgacggtagttttatggatgaactgctaacgctgatggcagcacaccgcgtgtggtcacgcattcctaagattgacaaaattcctgcctgatgggaggcggcgcaattgcgccgcctcaaatgatttacatagtgcgctttgtttatgccggatgcggcgtgaacgccttatccggcctacaaaactgtgcaaattcaatatattgcaggaaacacgtaggcctgataagcgaagcgcatcaggcagttttgcgtttgtcagcagtctcaagcggcgcagttacgccgcctttgtaggaattaatcgccggatgcaaggttcacgccgcatctggcaaacatcctcacttacacatcccgataactccccaaccgataaccacgctgagcgatagcacctttcaacgacgctgatgtcaacacatccagctccgttaagcgtgggaaacagtaagcactctgacggatagtattatcgataaacgccggatgacacatcacctccagcgaacgatcaccccgatggcctgcgtcatccagcacttgcaggaacagcgactcactgatctcttcaccgtagaatgcactgctgaatccctgggtagtgcgcaggttgaccggcaaatcaaacgccatctgacgatccgcccgcaacgcaatgccctgctctgccgcaaacctggcaacaatcgggaaaatctgcgggaacatatgcacatgatgatggctatcaagatgcgtaggtttgcgtccaaatagctcaatgaaacgcaaatactgactgacaagctcctgagtaatttcttccagcggtaaagcatcttcttctgccaactgccagatccattttcccagcacaccatcgcgggttaaccccggcatagctgtcagtggcttacccatagtaaggacaaagtgcatccctatggccagactcggttcatcacgactcaactgcaccgcatggtcaatagcctgcccattcaccagcgccgtcgtcgacgtgacaatcccattgcgacaggcctcgataatgccgtagttctgacctttgcttaagccaaaatcatcggcattaacaatcagtaagcgttccataatcagcctcggttaatgtgcttttttaagctctgcgatgcagtcggcaaagtttggcagccatttctcgtgcgccagaatcatctcgcgtgccagcagctcagcatcgcgatcggaatgcaccaacggactaaggtttagcgccagtaacacatcgttaaattctccgctaagtgcggcgttactggcagcaatctcgaagcctttaatggtgtgaatcagccccattactttatcatcgaaatgcgtaatgcgcggatgtggcgtcgcgccatcgcgccccagcttacaggtcatttctactgcccagtctgccggaatattatcaatctgcccatgatgcgggatattaacgtaatgttctgcttgcttgtcgttgtagatagcgttgatcacttcgcatgctgcatcagagtaataagccccaccgcgctgttccagttctttcggcttaactttcagctcaggatttttatacagctcaaaaagttgtttctcgactttctgtactacctgcgctcgtgcgccgcctttgtagtattcgcccatttcaatagccagcatctctttctgcttgaagtaatacagcagataagaacatggcagcagattcaacgaacgaattaagccctcactaaatggcagatcgaaaatattttttacagaggacgcttttaactgccctgacgccacaccatcaagcaattcggcaaagcgcgacttgccatttatcagcacatccttaatgaacaccatatggttgaggccgaacaaatcgatagataaatcatcgctgtctttcagcatcagaacatcgcgaataaacatcttcatgccgatcggaatattacacacgccgataaagcgtttaaatccggtatgacgataaacggcttcagtgaccattcccgccgggttagtgaagttaatcacccatgcattcggacaaagttcttcgacatcttttacgatgtcaaaaatcaccggaatggtacgcagacctttaaacaaaccgcccgcgccgttggtttcctgaccaagataaccatgacttaatggaatacgttcatccagttcacgcgccggtaattggccaacgcgcagttgggtagtaacgaaatcagcatctttcaatgcttcgcggcgatccagcgttttataaagcttcatcgggacgccagcgttatcaatcatccgttggcagagatcgaaaataatatccagtttcggtttaccaccttcgacatccaccagccataattcgctgaccggcaattcgtgataacgcttaataaatccttccagtaactccggggtatagctgctcccgccaccaatagtgacgacttttaatttctggctcataatttctcccttcagtacagaatactgatatctggcatatctgcccccccggacataaataatccagcaacaggacagatatgtgaattgtcaggtataacgacttactgattaaattcagtcaatttcttacgatagctcttaggcgtaaaggacgttaatttcttaaacgttttaataaacaaactcgggctactataaccggcctcaaacgcaatatccgtcactgaatagttggtcatttccagttgttttttggcaaaattaatacggatttcattaataatctgcattggcgttttgccataatatcgttgagtcgctcgcgtcaaatattcctgtgatttggctgacaacgccaccatattctccagcgccgattcactaaactgctctttatcatgcatcttttctaccgtacttttcagccactgcggtacatcatcaatcacctgttcttcgcggtaatgacgtaaacggttaatgacataaaaagtaaccatctcaacaaactcttccagccctgtttcgcggaaattcaatgaagaaatcactgtttccacataggtgagaaaagcgttattggtccggtatacctgcgaagcgacaaagcaataaggcaacaatggcaggtaatgctgctcaaaaaagcgtttactgatcccaacgttcaatatgcgcgtggcaccaaactcataaaaactttgatggtgcgaacctaacggaataaaaacaaaatcgccccgttccagtaacacgcgcttaccgttaatctcctggaaataacgcccggttaataccagagtaaattcataatagtcgtgctgatgcagtccgctgatactctcagttttgttatagataaacacatggaagtttttgccattaaacaactgctgttctcgggcagtggcaatttccggcgcgttaatcactggctgcatcatcgactccttatgccttcagtttttcatgaagctcaattaattcagtaatcagttcacgcgcaagcatggacgtcattaaatgatcctgagcgtggaccagcaccagactcactttcatcttaccttcgcccgcatcgccttcaatcagtttcgtctgtaccagatgcgcttcattcaatgccatccgtgactgatccatcatggcttttgctgcggcaaaatcgccctgcttcgcctgtttcagtgccgcatacgccaggctgcgcgcttgtccggagttgatgatcagccccatcaccacttcttccagctcttcagcttccgtttgcgtatcgggaatgttatcgagatccatcatacatcgttcctctcttttcttaccggcacgattacccgtaccggcatcgattaaaatttcagggcgttagcgatatcttcttcgctctcttctttatcaatcgcattttgtgctttgttagccaccacaacaaagggcagataaattaacgttgcgatgccaaggttgaagagtgcgaccagcaatgcggcgacgctaccgttggtgttaaagaaggctcccagaccggttggcatggtccacggtgcaatattggtcaccggaggaataatgcccatgtagtacgctgcgagggtgattgccgccagaatcggttgtaccagtacaaacgggataaacatcaccgggttcatgataattggcagaccaaacagaatcggttcgttaatctggaagatgccggacggcagcgccagttttgccacctgacgataatcagcacggcgagaggcgataaagatagccaggatcaggcctaaagtcgcaccactgcccccaaggaaaataaaggagtccagcatcggcttggcccagatatggaaggtcttaccggctgccagcgccgcttcgacggaaccatattgctgataggtcgcgatattttccagtgcccacggcgtcataatgccgttgtccagtgcggtcagcgccagcgcgccatgaataccgaagaaccagagcagtggaacaaagatcacataggcccagcccaccacgctacccaacgatgccagtggggttgagatggtatccataatgatctgatggaagttggtgccccaggtattcaacgcccaggcaataatccccatcacggaaagaataataaagccgggaattaatgccgagaaggaacgcgatactgaagcaggtacgctgtcgggcagtttaatgacccaattgcggcggacaataaaggtaaacatttctgccaccaccaggccaataataatcccggagatgatattcgccccacctaaccagtttgcaccaaccgcataggcctcaccgacactatatggggtgacggtcataaatgctgcaacggataacaacccagccgccagcgcatcgactttacgctcttctgccagcgccatgccaataaagaacggtgccattaaagacattattcctaatgttccgttatatacgttgccgccaatacctttcagaccattaagtgtttcaatggttgaggcgtcgaggcgaatacctaaggaataaaaaaacgacccctccccaaagcttagaaaaacgttgttaattaatacaaacatggcccccgcaagggttaacggcattaagcgaataaagccatttttgattgcattaacgtgtggctgctttcctattttaactgcaaaagggaggagtaccttttcaagcgatgcaataacattactcatagaaaaatacccttaaaaaccgcaatttaaatattgcggtattgatttatgaaataactctttgacgggaaaatttaaaataaattaatttgctgcggcttttttaatcgctgcaaccgcagccttaagcacgcctaaaccatcgactttgccataaagcagcgagtcaattacttcaaccggtttgttgggtaacaaacgctggatttcgggcaacatataagcaatctgcggccctaataacacgacatcggcattctgacctttttcaccagccagtgtttccggaaatgcttcaataatgaccggaacttcatatttttctgcctgtgcgcgcatttttgataccagtaaagaggtagacatgcccgcagaacaaaacagataaatgtgtttcttttccataaaactgccctcatcgacgattatctgtcagccagacactccgcaagccttaacctgcttccatgctctgggtaacttgcgaaaccaacatgactttttttgtggctgaaaggagtatacggtatagacctgagcaatagtatttctttgaccttataaattgtttctccttgacctgtggttatgaccctcttcacatttcgggcaaataattcgcgaagataattaagaactcaggccaaaaaaaaccggcgcaatggccggtttccgttgttactcaagctttcagacgaattgattacttcgcagcctgtggatcagtgtcgtattcagcacaggtctgataaccggagttgatgacatgtccggtatcatctaacgcgacaaagtaggtttctgctttaccatcacgttgacccaggatgtaggtctggcaagtaccgcgagcatggatcatgctcacttcagacgaaggtttacccgcaatttgtgcaacctgcgcccggctcatgccttttttgacgtctttcaccacaggctgtacaaactggtctttggtacgatcataagccgtacaacccgccagcatggttaataccgccgctgcactcagaattcctgccatattcttgttcatattccgtcctcttgtttatcagcgtgttagataagcctggaatacattgggcgctttttcaagcccgtgaacgaaacggctccgctttcagaggattcctgtatgacgttttaaccaccattcagcccgctgtcgcttgtcgtttcagtagcaacgggttagctttaaggaagttttgtcttttctgtctggaggggttcaatgacattgcaacaacaaataataaaggcgctgggcgcaaaaccgcagattaatgctgaagaggaaattcgtcgtagtgtcgattttctgaaaagctacctgcaaacttatccgttcattaaatcactggtgctcgggatcagcggcggtcaggactccacgcttgccggaaagctgtgccagatggcgattaatgagctgcgcctggaaaccggcaacgaatcactgcaatttattgccgtacgcctgccctatggtgttcaggccgacgaacaagattgccaggatgccattgcctttattcaaccggatcgcgtattaaccgttaatatcaagggcgcggtattggccagcgaacaggcattgcgggaagcaggcattgaactgagcgattttgtccgtggcaatgaaaaagcgcgtgagcggatgaaagcacaatatagcattgcgggtatgaccagcggtgtcgtggtgggcaccgatcatgcagcagaagccattaccggattcttcactaaatatggtgacggcggtacggacattaatccgctgtatcgtctcaacaaacgtcagggtaaacagttactggcggcattagcttgcccggaacacctttataagaaagcgccaacggccgatctggaagatgatcgcccttctctgccagatgaagtggcactcggcgtgacctatgacaatatcgacgactatctggaagggaaaaacgtacctcaacaggtcgccagaacaatagagaactggtatctgaaaaccgaacataaacgccgtccgccaattaccgttttcgatgatttctggaaaaagtaataatttgcacatattggattgtgcgaaaaagagtaatttgttcacgccggatgcggcgtgaacgccttattcgacctataaaactatgcaaattcaatacattgcaggagtcgaataggcctgacaggcgtagcacgtcagacggtgtaacctttgtcatcgacccgcctcttttttaatcgcttcccgcctgttacactggatagataaccagcattcggagtcaacagtggtacggcgtttaacttctccgcggctcgaatttgaagctgcggcaatttatgaatatcccgaacatttacgttcattccttaatgacttacccacccgaccaggggtgtatctgtttcatggtgaaagtgacaccatgccgctctatatcggcaaaagcgttaacatccgcagccgcgtcctttctcatttacgtaccccggatgaagccgccatgctacggcaatcccgacggatcagctggatatgtaccgccggtgaaatcggcgctctgctccttgaagcgcgattaatcaaagaacaacagccgctgtttaataaacggttgcgccgcaatcgccagctctgtgccctgcaattaaatgaaaagcgcgtcgatgtggtgtatgccaaagaggtggatttttcacgagcccccaacctgtttggcctgtttgccaataggcgcgcagctttgcaagcattgcagaccatcgctgatgaacaaaaactttgttatggcctgctgggactggaaccgttaagtcgcggtcgtgcatgttttcgttcagcgctaaaacgttgcgccggagcatgctgcggtaaagagagccatgaggaacatgcgctacgcttgcgccagtctctggagcgtttgcgggtggtgtgttggccttggcaaggggcggtggcgctgaaagaacagcacccggaaatgactcaatatcatattattcaaaactggctgtggctgggggcggttaattcgctggaagaagcgacaacgttaattcggacacccgccgggtttgatcacgacggttataaaattctttgtaagccgctgctttccggtaactatgaaattactgaacttgatccggcgaatgaccagcgagccagttgatttcactgaacaacagtttaccttgcggttgtaaaagccgcagggtgtgcctgccatcgaaccagcacgcgccctggtcggtagtgagcaatttatcgcccagttgccacgccccgttaatcacaaacaccaccccgccgcgtgagccaaaggtagtaaacgtacgttcggcaattctgactttcgccttacagacatccaggcgtgtcatgatgttgaaatccatcgacatctgccctgccgtcagtttcgcttttaccacctggtccgctgcaaaggcaaaaggctggaacggttttaaggtatggttaaagcggtctgcgctttcaaggagcatctcgccgccttccagcaacgtcactatcctttccatgccgggaaacaaagaaaactccccattcgccgcgatggatgcaatgctggcacgccagtaaaaatcacgttttgccggtgggaacgtgcaaatttcgcgcgtttcaccggcagcatttcgccacagattcaccgacattttacgcatatcaaagtattccatactcgctcccggcccgttcttttcattgttatcgttcaggtaaccgtggatggttatcggcaactcgggtgatttacgttagtggtgatcaggctttttttacaactgtttgagaagagaaaagaaaaccgccgatcctgtccaccgcattactgcaaggtagtggacaagaccggcggtcttaagttttttggctgaaagattattcagcagttgcaggcattttaccttttgccgctggacgttctgtcagacgcttctcaaaattagcattaaattgctttttctgttccggcgtcaggatgttgtaaattttgttctgggtttccatgtgcgccagcatgttagctttgcgctgttcttccatttttgcgatctgcgcttcagcttttactttatcgaaggtatcgctggcaatgatgtcatgcattgcgcggcgttcttccagcggcggacgtttcatctggtcacgctggcctttcatgatttcgcggatctgctgtttctgcgcgtcggtcaggttcaggtctttgaacatcatgtcctgatgcggaccgaacttgcctttgtggtgcatcatcggcttcgcgtcagccggtgctgcggtagtggtgtctgcggcatgggccaggttagccgcgccaagagccagggtagaggcaacaaacagtgcagttaatttacgcatattctatatccttcctttcagttatttattacggctttcttaagtagcgtgccgtgttgacgagattaactttactgactttagcgtcaattaatcagagcaacggtaaaacaatgaaagtgtaaaaaacacttttgcgccaattatggagaaaaaaagaaaatttgatggagagtgatgagagaatattacaacacgatgattttgcagagattatgaagaactataccggatgactggtgataaataaagcaaataaccaggattaatctgtattaatttataagaaagcaacttaatacccgcagaatgatttctgcgggtaagtattagcttattttttcgagcattaatcccgcgcgtaatcccaacgctaccaacggattagggaataacacatactctacatcatgggttacggtaaaacgttcctctccgtcctgcgccagcaatgttcctttctcaaacggcataaaattcagcgtgtcacttgccatatgcatttcgaaggacggcgagtggcgagtaatttgcgaaaccacccgataacggagcggcggtgttctcacgataccgacactctcaccagatagcagcgcagcaattgcgctggcagttactgcaaactggcgaagatcgttttgcccaaagggcaacgctttgccaagttccagcgtacaggccagcgcgccaaaatgtctggcgctgaaatgggtaaacgtaccaccaggttcctgatggaacaccagcgcctccagccccgccgcacccagccacgtcagaaatttctcgtcccagggaatgtcgcgttgcggtaatacaccgaactgcggatgcaaggagccacgaattgcggtatgtagatcaaggtgccagcgcacagattctttgccctggtcataaaaatcttccaggcactgttccagttcgcgcgcccgacaggtttctccgctttcagcaaatagctgccaacgaccgccaaacattcgattcatatcgctatggcaataacgtttcccttgcttcagcgcaggaggattcccgaggatcaccagcaaccgccaacgtaacgggatctcgccgtgagatatcgcgccaagcaacgcgtccagcatctccacaggtgccgtctcattaccgtgtattcccgctgaaatcaccagtgcgccttgcggtggcgttaatggcgtcagttccagcacaccatcgcccagccagcgccagcgaacgccgttgatttctcgctcggtgataaccggttttttacccgttaaggtcagagcaagaaaattatccattgccccctccctcgcgctggaacggataaaccgaaccgagattcagtaattggctcaatacatccagtgcttcccgcccttcgcgcagcaattgcgggtcggccagatcggcagcagtaaggcgatcgcggtagtaacgatccacccagtcattgagcgcattaaacagcgtatcgttcatcatcaccgccggattcaccgcccggcgttcttcttctgtcaataccacccgcaaccgcaggcacgccgggccgccgccattcgccatgctttcacgtaaatcaaagacttttagttcgctaatcgggttgtcagcggcaaggagttcattgagataaccccatactccggcgtgttcccgacactcctgaggcagcaccaacatcatggaaccatcatcgcggctcagcagttggctgttaaacagataggtagacaccgtatcagacacggaaacctgagttgccggaacttctatcgccataaaaccattgacccgcgcacgcaggtttgccagtaactgtgactggcgagcgaacgcctgttggtggcaaaacagcacctggcggttactcacggcaatcacgtcattatgaaaaacgccctggtcgataacgtccgggttttgctgggcgaaaatcacctgttggggattcacctgattcagccttgccaccgcctcgctggcttcgcgagtctgtcgcgccggataacgggaaggccgggtatcattgccttcttctcgcccgtagacaaaaagttgcatacccggttcaccgtaatgaccgccgagacgattgtggtttgccgccccctcatcaccgagcaacgctacctgtggcaacgccgaatggacgctaaatttctcttcgtcgttaaaaatcgcttttaacagcgattcagtgacgggcgcttccagcgaacggtgaaatttattgttcaggttggcaacggtgagatgcactttgccatccagcgtatcggcagatggcgcgatcgttgccgcattggctacccacattggcgaagcggaactgacgctggaaagccagtgcggtgcctggcgtgcaactttttccagtacctgctcatcgctaccactgaatcccaactgacgcagcaccggaataaacggacgctcgtgcggcgggatcacggcctgggggaatcccgcatcggcaagggctttcattttcagtaagccctgcttcgccgccagtcgcgggttagacacctgaaaacggtgacgggtagaggcttcattaccaaacgacaggcccgcgtaatgatgcgtcagccctaccagcccgtcgaaattgacttcccaggcgttcatcgcaccacctcatcggaaaaatccagcccggggttaagcgtggcgggcaatgttaacgagtccgactccaggctcgccatcggccatgcgcagtaatctgcggcataccaggcgctggggcgatggttaccggaagcaccaatgccgccgaatggcgcggtactggcagcaccggtaagcggtttgttccagttaacaatccccgcccgcgcctccagcaacagttgatcgaacttttcccgctcgggggaaaccagaccgcaagagagtccgaagcgagtgttattcgccattcgaatcgcttcatcgaaagtatcataacgccagacgcgcaataacggtccgaacacctcttcatctggtacgccagcaacgcctgtcatttcaatgatccccggcgtcagcaacgatgtccctgcttgtaataagcgcggcgcaagcaggggtcgtccgcccatcgcttccagttgctgccatgcagtaaccacctgctgtgcggcctgttcagaaatcagcccgccaataaacggctgcggttcgtcatcccagttgcccggcgttaatcgctggctgacggcaaccagacgagcaagaaacgcatcgccctgcgccccgcttttcagcaataaacggcgggcgcaggtgcagcgttgaccggctgtgacaaacgccgactgaatggtcagatggacagccgcgtcgatatccgccacctcatcgataattagcggattattaccgcccatctcaagggcgagaattttctccggctgaccggagagctggcgatgcaactggtagcctgtattggcgctaccggtaaacagcaaaccgtcgagatcctccagcgcactcagcgcctgacccgtttcacgcccgccctgcaccaggttcagcacgcctggcggcaagccagcctgctgccataaacgcattaccgcttcgccactccacggtgtcagttcgctgggtttaaagataatggtgttacctgccagcaatgccggaacgatatgtccgttcggcaaatgaccagggaaattatacggcccaaacaccgccagcacgccgtgcgggcgatgtcgcaggctcgccgcgccgtccggcatttcactacgctgctcgccggtacgaacgtgatacgccttaattgatatcgcgattttattgatcatcgccgtcacttcggttgccgcttcccagcgcggcttacccgtttctctggcaataatcgcggttaattcggctttattgctttccagcagtgcggcaaagcgttcgacaacggcatgacgttcagcaaatgaaagccgcgcccagcgcggaaacgccgcacgggctgcccgacaagcctgctcgacctgagcggcatcggcatcattgccttgccataacacctcgcccgataccggattacgcttcacacgcgatgcgccctggcccgttatccagtcaccgttaatccataaagtcatgctgttttctcctctgcgcacaggcgcaccagacgaacgcgatccccggcgtggcatttgagggcatccagttgtgcggcggttaaaatcaaacgctcggttgccggatcggtacgcaccagcaccacgcggaaatggtgataattttcattggcgaccaggcaggctgggaaatcgccctgcgcaggctgcccttctgccacttccaccagccgacttttacggatggcgcgcacgcggtcgatgtcacactcaagcgtcggcccaccgtcaaagatgtcgatatagttacggtagcgaaaaccttctttctccagcaccgcgcgggcaggcgcggtttgcggatgtacctgaccgatgacgtcctgggcttcctgggataaaaagtgggtatagatcggatgtttcggcatcagttctgcaataaatgccttttgcccggtgccgcagagaaaatcggcgcggctaaaatccatcgaaaagaagcgtttaccgaggctttgccagaacggtgaatagccgtgttcgtcaatcaccccgcgcatttcagcaaccactttgtcattaaacttgtcgcgaaaagccgccataaacataaagcgcgatttcgacagcaaatagccgttgccctctttgcgccagtccgggtcgagaaacagcgtgcacagctcgctgctgccggtgtgatcgttactgagaaacagcgtcggcaatgcgttatagacattcagctcttttgaggcgtgaaccaacgtgccgacgcgatagttgtaccagggatcgttcagcccaaccgccacctcaatggcacaaatccccgccacggtgcctgtctcgctatcttccagcacgaacacatagccctgctcacttttgggcagttcgccttgccaggttttgattgccctttcgatacgcgccgaaagcgtggcttcattggcgggaagcgacgtcaggccgccgcccgttttgctggcaagctgcatcagcgccgagacatctgatcgctcaacgggacggatgaccatcatgatgaacctcggctaacaaagtgttcgcaagcagctgcaaagcgatccagtccggtcgtcacctcttcttcgctgacattgagcgcaggcgcaaaacgcaccacgttgccacccgcaatcagtaccatcacgcctgctttcgccgcttcctgagagatctgtttcgcttgcccggcgtaatcggcattcagtacacagccaatcagcaaacctaagccgcgaacttcactgaacaaaccatagcggtgattaatagtattaagacgctcaacaaaccagtcgtgacgctgtttaacgccattaagcatctctggtgtgttgatgagctccagcactttgcctgccaccgccgaggccagcggattaccgccataggtggtgccatgagtgccaacggtcatcacgcgggcgcactcttcggttgccaacaacgcaccgaccgggaaaccgccgcccagcgctttggcggtagttaacagatcaggcgtcacgccgtagtgcatataggcatacagttccccggtgcgcccgacgccggtttgtacttcatcaaaaatcaacagcgcattgtggcggttacacaattcacgcagaccttgtaaaaacgcgttgctggctggcaccacaccgccttccccctggatgggttcgacaatcaccgcacaggtagagtcgtcaatcagcgcgctggcagagttaatatcgttatatgcagcatgacgaatatccgccggcagtggcgcaaaatcctgtgaataggctggctgcccacccgcactgacagtaaacagcgtgcgaccatgaaacgcatttttgaacgccacgatgccgctcttatggctgccgtagcggtcgtgagcgaatttacgcgccagttttagcgccgcttcgttggcttccgcaccggagttacaaaagaagacgcgatcggcaaacgtggcgtcgatcaattttttcgccagtcgcagtaccggctcgttggtgtaaccgttgccggtatgccagaacttactcgcctgttcgttcagcgcttcacgcagttccggatgcgcatggcccagcgcgttcaccgcaatgccacccgcgaagtcgatatactctttcccctgctgatcccacaagcgcgaaccttcgccacgtaccggtataaagggtgccggagcgtaaacaggtatcatccattcatcaaagttttcacgcgtaattggctgagacatagcgacctctacagtaaataattcgttatttatatgttaataataagtaatgtttgcgctgtaaatgtagattgcagggttcgtgccagccagtgataaaagtgcataaacggcggaggctaactggaaatcaaggagttataaccaaaccatatgcatttaaagtgcatataaagtgaatacgtttgcgatgtgggtgaataaaaagaataaaaaacgcaatgttatgcagaagtaaaatataattctggaattgtgatcattgacgaaatttactggaaattactgcgccattctgacgcagcgcgcaccaaaagcgggcattttttgcgccatcgttgacatcattaacaaccatcgatcaaatcacttaacaacaggcggtaagcaacgcgaaattctgctaccatccacgcactctttatctgaataaatggcagcgactatgaaatttgtctcttttaatatcaacggcctgcgcgccagacctcaccagcttgaagccatcgtcgaaaagcaccaaccggatgtgattggcctgcaggagacaaaagttcatgacgatatgtttccgctcgaagaggtggcgaagctcggctacaacgtgttttatcacgggcagaaaggccattatggcgtggcgctgctgaccaaagagacgccgattgccgtgcgtcgcggctttcccggtgacgacgaagaggcgcagcggcggattattatggcggaaatcccctcactgctgggtaatgtcaccgtgatcaacggttacttcccgcagggtgaaagccgcgaccatccgataaaattcccggcaaaagcgcagttttatcagaatctgcaaaactacctggaaaccgaactcaaacgtgataatccggtactgattatgggcgatatgaatatcagccctacagatctggatatcggcattggcgaagaaaaccgtaagcgctggctgcgtaccggtaaatgctctttcctgccggaagagcgcgaatggatggacaggctgatgagctgggggttggtcgataccttccgccatgcgaatccgcaaacagcagatcgtttctcatggtttgattaccgctcaaaaggttttgacgataaccgtggtctgcgcatcgacctgctgctcgccagccaaccgctggcagaatgttgcgtagaaaccggcatcgactatgaaatccgcagcatggaaaaaccgtccgatcacgcccccgtctgggcgaccttccgccgctaatttagcagctctcctggctcaaactgggtcaggagaattaaccttgagaaaaatcaacaaactgtcagtaatgatttgttgcctgccgtcctttgttataccgtctctgcgtttttagttgtctgaccacttctctattatcaagtttgatataggaaactccacgatgaacgctgagcgtaaatttctttttgcctgtcttatttttgcgctggtcatttacgctatccacgctttcggtttattcgatctgctcaccgatttaccccacttacagacactcatccgccagagcggatttttcggctatagcctctatattctgttattcatcattgccaccctcttgctgttaccaggaagcatactggtgatcgcgggaggaatagtttttggcccgctcttagggacactactctcattaattgccgccacgctggcctcctcgtgctcattcctgctggcgcgctggctgggacgtgatttactgctgaaatacgttggccatagcaataccttccaggccattgaaaaaggcattgcgcgtaacggtattgattttcttattctgacccgcttaatcccgttgtttccttacaatattcaaaattacgcttacggattaaccacaatcgccttctggccttatacccttatttcggcactcacgaccctacccggtattgttatttataccgtgatggcaagcgatctcgccaatgaaggcattacgctgcgctttattttacaactctgtctggcgggcctggcgctgtttattctcgtccagctcgcaaaactctacgcccgacacaaacatgtggatctgtctgcttcgcgccgcagcccacttactcacccaaaaaatgaaggatagaacgatgttgcaacattattcagtgtcatggaaaaaaggactggctgcactctgtttactggctgttgctgggcttagcggctgcgatcaacaagagaatgcggcggcaaaagtggaatacgacggactttcgaacagccaaccgctgcgtgtcgatgccaataaccatacggtaaccatgctggtgcaaattaatggtcgtttcctcaccgacgacactcgtcacggtattgtgtttaaagatggctccaacggacataaatcgctgtttatgggttatgcgaccccgaaagcattttatgaagccctgaaagaggcaggtggtacgccgggcgaaaacatgacgatggataataaagaaacgactcatgtcacaggcagcaaactggatatttcggtcaactggcaaggggcggcaaaagcgtattccttcgatgaagtgattgttgacagtaatggcaagaaactggacatgcgctttggcggtaatttaacggcagcagaagagaagaaaacgggttgcctggtgtgtctggatagctgcccggtcggcatcgtcagcaatgcaacatacacttatggtgcggttgaaaaacgtggtgaagttaaattcaaaggcaatgcctcagttctcccggcggataacacgctggcaacggttacctttaaaatcgccgaataaagccaggataaaggatgatgatgatgcaatcgcgaaaaatctggtactaccgtataaccctcatcatcctgttgttcgctatgctgctggcatgggcgctgcttcccggcgtccatgagtttatcaatcgcagcgttgcggcgtttgccgccgtggaccaacagggtatagaacgctttattcagtcttacggcgcactggcggcagttgtctcgttcttgttgatgattttgcaggccattgctgcaccgctacctgcgtttttgatcacctttgccaatgcgtcgctgtttggcgcgttctggggcggcttgctgtcgtggaccagttcgatggccggcgcggcgctgtgcttttttatcgccagagtgatgggccgcgaagtggtggaaaaattaaccggcaaaaccgtgcttgacagtatggacggctttttcactcgctacggcaaacacaccattctggtctgtcggttattgccttttgtccctttcgatccaatcagctatgctgccggtttgacttcaatacgttttcgctcgttttttatcgccaccgggcttggtcagttaccggcaactattgtttattcctgggcgggcagcatgttaacaggcggtactttctggtttgtcaccggactgtttattctgtttgccctgaccgtggtgatttttatggcgaagaaaatatggcttgaacgccagaagaggaatgcctgatgggtttaccgccgcttagcaaaattcctttaattttacgtccacaggcgtggctgcatcgtcgccattacggcgaggtgctaagccccattcgctggtgggggcggatcccgtttatcttttatctggtgtcgatgtttgttggctggctggagcgcaaacgctcaccgctcgatccggtagtacgatcgcttgtcagcgcgcgcattgcgcaaatgtgcctgtgtgagttttgtgtggatatcaccagtatgaaagtcgccgagcgcaccggcagcagcgataaactgctggcagtggctgactggcggcaaagcccgctctttagcgatgaagaacggctggcgctggagtacgccgaagccgcaagcgtaacgccgccaacggtcgatgatgccctgcgtacccgactggctgcgcattttgacgctcaggcgctcaccgaactgacggcattgatcggcctgcaaaatctgtcagcccgttttaattctgccatggacattcccgctcaggggctgtgccgtattcctgaaaaacgttcttaaggagagatgatgcgccattgtgggtggttgctgggattgttatcgctgttttctctggcaacacatgccagtgactggcaagaaattaaaaatgaggccaaagggcaaaccgtctggtttaacgcctggggcggcgataccgcaattaaccgctatctcgactgggtgagcggcgagatgaaaacccattacgctataaacctgaagattgtccgtctggcggatgccgcagacgcggtgaagcgcattcagaccgaagccgcagccggacgtaaaacgggcggctcggtggatctgctctgggtgaacggcgaaaacttccgcaccttaaaagaggccaatttattacaaacgggctgggcggagactctgcccaactggcgctatgtcgacacacagctgccggtgcgggaagatttttctgtgccgacacaaggtgcggaatcgccctggggcggcgcacaactgacgtttatcgcccgccgcgatgttacgccacagccaccacaaacgccgcaagccttactggagtttgctaaagccaatcccggcacggttacctatccgcgcccaccggactttaccggcacggcgtttcttgaacagttgctgattatgctgacgcccgatcccgccgcattaaaagaagcgccggacgatgcgactttcgcccgtgtcactgctcccttgtggcaatatcttgatgtgctgcatccgtatttgtggcgcgaaggaaaggatttcccgccttcacccgcgcggatggatgctctgctgaaagccggcacattgcgcctgtcgctgacctttaaccccgcgcatgcgcagcaaaaaatcgccagcggcgatttgcctgcaagcagttacagttttggctttcgcgaggggatgattggcaacgtgcatttcgtcaccattcctgccaacgcgaatgccagtgctgcggcgaaggtagttgccaatttcctgctctcacccgatgcgcaactgcgtaaagcagatcccgctgtctggggcgatccttctgttctcgatccgcaaaaactgcctgacgggcagcgcgaatcattgcaatcaagaatgccgcaggatctgccgccggtactggctgaaccgcacgcaggttgggtaaatgcgctggaacaagaatggctacaccgttacggtacgcattaatctttttgctgtgggcgatggtggcggtgatttatgcaccgctgatcccggcagctctcacgctgatatcgcctgctttgtcgttgacacactggcaggcgttatttgccgatccacagttaccgcaggcattactggcaacgctggtgtcgacaaccatcgcggcggtcggggcattgttgattgccctgctggtgattgtggcgctgtggcctgggccgaaatggcagcgtatgtgcgcccgtctgccgtggctgctcgccattccccatgtggcttttgccaccagcgcccttctgctctttgctgacggagggctgctttatgactatttcccgtatttcactccgccaatggaccgatttggcatcggtctgggcctcacccttgcagtgaaagaaagcgcatttctgctgtggatcttagcagcagtattgagcgaaaaatggctgttgcagcaggtcattgtgctggattcgctgggctacagccgctggcaatgcctgaactggctgctgttgccctccgtcgcgcctgcgctggcaatggcgatgctggcgattgttgcctggtcgctgtcggtcgtggatgtggcaattattctcgggccaggtaatcccccgacgctggcggtaattagctggcagtggttaacccagggcgacattgaccaacaaacaaaaggcgcgcttgccagcctgctgttgatgctgttactcgccgcctacgttttgctgagctatctgctatggcgcagctggcggcgcactattccccgcgtagatggcgttcgcaagcctgccacgcctttattgccgggcaatacgctggcgatttttttacccttaaccggtgtgctgtgtgtggttctgctggcgatcctcgcggatcagtcgacgatcaatagtgaagcgctcatcaacagcctgacaatggggctggtggcgacattcatcgctttgctcctgttactgctgtggctggaatgggggccacagcgtcgccagttgtggctatggttgcccattttattacctgctctgccactggtggcgggccagtacacgctggcgctatggctgaaactggatggaagctggacggcggtggtctgggggcatctgctgtgggtgatgccgtggatgctgtttatcctgcaacccgcctggcagcgcattgattcacggttaattttgattgcgcaaacactgggctggtcgcgggccaaaatcttcttttacgtgaaatgcccactcatgttgcgccctgtgctgattgccttcgcggtgggatttgcagtcggtattgcgcagtatatgccaacgctgtggctgggcgcggggcgttttccgacgctcaccactgaggcggtggcattaagcagcggcggcagcaacggtattctcgccgcccaggctttatggcaactgctattaccgcttattatttttgccctgaccgcgttagtcgcaaaatgggtaggttatgtcagacaaggactccgctaatgctctgcgtgaaaaatgtttcgctacgtttaccagaaagccgcttgctgacaaacgttaactttacggtggataaaggtgacattgtcacgttaatggggccgtctggctgtggaaaatccactctgttttcatggatgattggtgcactggccgaacagttttcttgtacaggtgagctatggctcaatgagcaacggattgacatcctacccaccgcacagcgtcagattggcattctttttcaggatgcactgttatttgaccagttcagtgtcgggcaaaatttactgctggcgctaccggcgacacttaaagggaatgcccgacgtaatgccgtgaatgatgcacttgagcgttcaggccttgagggagctttccatcaggatcctgccactttgtctggcggtcagcgagcgcgcgttgctctactacgcgcccttctcgcccaaccaaaagcgttactcctggatgagccattcagccgtcttgatgtggctctgcgcgataattttcgccagtgggtgttcagcgaagttcgcgccctggcgatccccgtcgttcaggtaacgcacgatctccaggatgttcctgctgatagttctgttctggatatggcgcagtggtcagaaaattacaacaaactgcgataacgcaaagtttttctcaatgcgtcagttcagaatggcgcactcaaaactacaatgtcgggattttcgatgaaacgtgtttctcaaatgaccgcgctggcaatggctttagggctggcttgcgcttcttcgtgggccgctgaactggcgaagcctcttacacttgaccagcttcaacaacaaaatggcaaagcgatagatactcgccccagcgcgttttataacggctggccacaaaccttaaatggcccttctggtcatgaacttgccgccttaaacctctctgccagctggcttgacaaaatgagcaccgaacagctcaacgcgtggatcaagcaacataacctgaaaaccgatgctccggtggcgctgtacggtaatgacaaagatgtcgacgccgtcaaaacgcgactgcaaaaagcaggtttaacgcatatctccatcctgagtgacgcgctaagcgaaccttcccgtctgcaaaaactgccgcattttgagcagctggtttatccgcaatggctgcacgacctgcaacaaggtaaagaggttacggcgaaacctgccggtgactggaaagtcattgaagcggcctggggcgctcctaagctttaccttatcagccatattcccggcgctgactacatcgataccaacgaagtggaaagtgaaccgctgtggaacaaagtttctgatgaacaactaaaagcgatgctggcaaaacacggcattcgccatgacaccacggtcattctgtatgggcgtgacgtatacgctgcagcgcgtgtggcgcagattatgctttatgctggcgtgaaagatgtgcgcctgctggatggcggctggcaaacctggtccgacgcgggactgcctgttgagcgcggaacgccaccgaaagtgaaagcggaaccggatttcggcgtgaagatcccggcacaaccgcagttgatgctcgatatggaacaggcccgtggactgctgcatcgccaggatgcatcgctggtgagcattcgttcgtggccagaatttatcggtacgaccagcggttacagctatattaaaccaaaaggtgaaatagccggcgcacgttggggacacgctggtagcgactcgacgcatatggaagattttcataacccggatggcaccatgcgcagcgccgatgatattaccgctatgtggaaagcgtggaatatcaaaccagagcagcaagtttcattctactgcggcaccggctggcgcgcgtccgaaacctttatgtacgcacgcgccatgggttggaagaatgtttccgtgtatgacggcggctggtacgaatggagcagcgatccaaaaaatccggtagcaaccggtgaacgcggcccggacagtagcaaataacattgcaattactgacgctggagcgacttcagcgtcagatacccactccacacccgcgtaaaggtcgtcatccagcacaacgcaccgaagatccacgcaaaccacgcaaaccatgcagggaataaacatcccagcacaaacagtaagatcgtttctgtgccttcggttaatccccccagatagtaaaacgacttatgtgcataaccggggttatcaatctgatgttttgctgccagtgcagcaaaggcgagaaaactgctgcccgtgccgataaacgcaaacaacaaccagccgcctgccagcgcattttgctccggtgcagcaagaataaagccaaacggcaccagcgcgtaaaagagaaaatcgagagaaatatcaagaaagccgcccgcgtcggtaagctctctgcgccgcgccagcgcaccgtccagaccatcaagcagcctgttcaacaaaatgacgactagcgccgccagataccagcccagcgccagaaacggcagagccagcacgccgatggcaaatcccactaatgttaaaccatctggcgtaatgcccggtttatcaagaacccgcacgcactgatgcaacaacggtttaatccggggatgaagatggcggtctagcacaggcactccttaaatataaagcctttctgattgagcaacagtgcggatattatggcatttttcgcttatctgcccgtgtgtaatttatgaaaatgattgaagttgttgccgccatcattgaacgtgatggcaaaattttactcgcgcaacgccccgcccagagcgatcaggcgggattatgggagtttgccggtggtaaagtcgagccggatgaaagtcagcggcaggcgctggtgcgtgagttacgcgaagaactgggcatcgaagcaactgtgggtgaatatgttgccagccatcagcgagaagtttcggggcggattatccatcttcatgcctggcacgtacccgacttccacgggacgttacaggcacatgaacatcaggcgctggtctggtgctcacctgaagaggcgctgcaatatccgctggcccctgctgacattccattattagaggcgtttatggctttacgcgccgccagaccagcggattagtgctaagggttttgtcatcacgctggcattgcagcagtattccttcggctttaattaccgccccttcagaataattttgatcctgataaacgcagcactgagtacagggctgcgctgactgcccgcctgaactgaacacttctggcggtacgtttacctccacgtccggacgataatgcgggttagccagtgcaattaatggaaatgctaatactacggcgaacaatgctcgactcacagggaactccttaacgttattgtctctgctactgataacggtagccgggtggcaaaactttagcgtctgagttatcgcatttggttatgagattactctcgttattaatttgctttcctgggtcatttttttcttgcttaccgtcacattcttgatggtatagtcgaaaactgcaaaagcacatgacataaacaacataagcacaatcgtattaatatataagggttttatatctatggatcagacatattctctggagtcattcctcaaccatgtccaaaagcgcgacccgaatcaaaccgagttcgcgcaagccgttcgtgaagtaatgaccacactctggccttttcttgaacaaaatccaaaatatcgccagatgtcattactggagcgtctggttgaaccggagcgcgtgatccagtttcgcgtggtatgggttgatgatcgcaaccagatacaggtcaaccgtgcatggcgtgtgcagttcagctctgccatcggcccgtacaaaggcggtatgcgcttccatccgtcagttaacctttccattctcaaattcctcggctttgaacaaaccttcaaaaatgccctgactactctgccgatgggcggtggtaaaggcggcagcgatttcgatccgaaaggaaaaagcgaaggtgaagtgatgcgtttttgccaggcgctgatgactgaactgtatcgccacctgggcgcggataccgacgttccggcaggtgatatcggggttggtggtcgtgaagtcggctttatggcggggatgatgaaaaagctctccaacaataccgcctgcgtcttcaccggtaagggcctttcatttggcggcagtcttattcgcccggaagctaccggctacggtctggtttatttcacagaagcaatgctaaaacgccacggtatgggttttgaagggatgcgcgtttccgtttctggctccggcaacgtcgcccagtacgctatcgaaaaagcgatggaatttggtgctcgtgtgatcactgcgtcagactccagcggcactgtagttgatgaaagcggattcacgaaagagaaactggcacgtcttatcgaaatcaaagccagccgcgatggtcgagtggcagattacgccaaagaatttggtctggtctatctcgaaggccaacagccgtggtctctaccggttgatatcgccctgccttgcgccacccagaatgaactggatgttgacgccgcgcatcagcttatcgctaatggcgttaaagccgtcgccgaaggggcaaatatgccgaccaccatcgaagcgactgaactgttccagcaggcaggcgtactatttgcaccgggtaaagcggctaatgctggtggcgtcgctacatcgggcctggaaatggcacaaaacgctgcgcgcctgggctggaaagccgagaaagttgacgcacgtttgcatcacatcatgctggatatccaccatgcctgtgttgagcatggtggtgaaggtgagcaaaccaactacgtgcagggcgcgaacattgccggttttgtgaaggttgccgatgcgatgctggcgcagggtgtgatttaagttgtaaatgcctgatggcgctacgcttatcaggcctacaaatgggcacaattcattgcagttacgctctaatgtaggccgggcaagcgcagcgcccccggcaaaatttcaggcgtttatgagtatttaacggatgatgctccccacggaacatttcttatgggccaacggcatttcttactgtagtgctcccaaaactgcttgtcgtaacgataacacgcttcaagttcagcatccgttaactttctgcgatagcagcagatatgccagtaaagaaatcccatttgactatttttttgataatcttcttcgctttcgaacaactcgtgcgcctttcgagaagcaagcattatataatgccaggccagttcttcttcaattgtcccgttttgaaaagctgtgcttgatatcgagatcatccatgataattccgccgcccatattagcttcgccgaggatttaccggagctatgattagcgcaatcagagatatagtctgagggaaaaacagcaaatttattcaacaaggcgataacctgctctggggcttcctccatgtttgctttaaaggtattggctccatggtcgccagaaagaaaatgctccattaaggcacaataactttcgctatcttcgataccccattgatcctctaaagactcgcgtcttttacttatgatatcgatcgagtcaaaaggaagcacatgatattggaaggtatctttgccaggttcaggctttcgcggccagaactccagcgtttcagaccattgcttatgatagaatcgataaggtgcgatcaattgtagcgcctgtaacttctcgatactgagcggctcaatacctttagcctgataataatgcagttgttctttttttgctttaaaaccggcccgaacaataagccccatcataattaatagataaagaaaagagcatcccgcggtaatcaggcctctttcattcaaaccgttggatgttatcgctgcgaacacaaacattacagcgacaacacatgttaaataaaacccccacttacaaagcagcatggccttattttctttaatcatccgttcaaaattactattaaatatttcccagccattaaaagaatacttctcgctcccaggatggttttgtaataaaacttttttcatcacattccctgttattacatactttagaggcgataattttatccatgcaaaaaaaatatccaacgaattttcttgatccgctggatatttcagaatatgactcgaatagcacgaaagattcactcgcttacgctatcgccccgcttccgacttcatctgctggcggactttttttcgcactacgtttacgcggtgcagcctttttcttatcagcactgccaccactgcccggagccacaatgccgcgaaactgccgcaccggcgtacgtttggcttgatcaataagctgatatagcgtccccaccagcggctgcataaagtcctgatagcgacactgcttttcgctgatttgcgtcagcaccgattcccagtgcgcggtcatgtccggtcgcgtcgccatctccggcagcgaatggaatagcgcttttccggcgtcggtggagtggatatagcgcccttttttggtcaggaaaccacgcttgaacaacagttcaataatcccggcacgcgttgcctctgtccccagaccatcggtcgcacggaggatctttttcagatctttatcctgcacaaagcgcgcgatcccggtcatcgccgaaagcagtgttgcatcggtaaaatggcgcggcggctgggtttgccgctctaccacttcacctttttcacacagcaactcatcgcctttcgccaccacaggcagtggcgtgccgtcgttttcttcatcgcgctctttgctgcctaacagcgtgcgccagcctgcttcagcaagaaaacgcgctttagcgacaaatttgcctttggcaatgtccagttcgataacacacttgcggaacaccgcatccgggcagaattgcatcagatactgacgggcaatcaggttatagaccttcgcttcgttctccgtcaggttgatcgcagaactccgtgcggtcggaatgatggcgtggtgcgcatcgacctttttgtcatcccaacagcggttgcgtatatctggatctaccactggctgcggcaacagatccggtgcatgaacactgatggcattcatcaccgcgtggcgtccggcaaaatgttcttctggcaaatagcgacaatcagaacgcggataagtgattagcttgtgcgtttcgtacagtttctggcagatatcaagcacgttctgcgcactcagaccaaaacgttttgccgcttcaatctgcaacgctgaaagcgaaaaaggcagcggcgcggattctgattcccgtttatcgttatagctggtgacaatagccggttgaccactaatgcggttaaccacatgctccgccagtggacgatgtaacaagcgcccttcttcatcctggtacggttcacacgcttcgctcggttgccagatagcggtaaaccgctcatcggcaggtgtcacgatatgtgctttgacttcaaagaagtctttcgccacgaagttttcaatctcttcatcgcggcgcaccaccagcccaagcacgggcgtctgcacgcgtcccacggaaagtacgccctgataaccggcattgcgaccgagaatggtatacgcacgggtcatattgatgccgtacagccagtcggcacgcgctcgcgccagcgcagaaacgcacagcggtacaaactcactgttggaacgaagacggtcgatcgcccgctcaaccgcctgcgggttcaggtcgtttatcaagcaacgctgtacctgctggcgcttttccggtgccagttgcagatagtccagcacttcatccaccagcaattgcccttcacgatccgggtccccggcgtgaacgatttcgctggcttcatgcaggaaccgtttgatgacgttaagttgtttggtcacggagggtcggggctgtaattgccacttttccgggacaatcggcaaatccgcaagattccagcgcgcatagcggctgtcgtaggcgtctggctgcgcctgctcaagcaggtgaccgatacaccaggtcaccacctgaccattaccgcactcgataaagccatcgcctttccggtgcggtttgggcaggacatcagcaatggcgcgcgccagactcggtttttcggcaataaacaaccgcattgaattaacgaatctcaaccatggcacgaccgccgcgcgctggcaccagttcgccaattgccgtcagttcaatgccaaactcggcggctgtagctttgacctcattttctgcttccggcatgaccgccagcagcaaaccgccagaagtttgcggatcacacagcagatcgcgcacttcacgcggcatttcacccatcagatgaccgtagctggcaaagttacgttcagtgccgccaggtactgcgcccaacttaatgtactcttcaacaccggggagtttcgggatcgcttcatagtcgacgcgtgcctgcacaccagccccctgacacatttcgctcaagtggcccagcagaccaaagcccgtaacgtcggtcatcgcttttacgccttcgatgttggcaaaggacgcgcctgcgatgttcatccggcacatcacttccgtcgccagtccctgatgttctggtttcaacagtgattttttctcagccgtggtaagaacgccgatccccagcggtttcgtcaggaacagtttgcatccggcttgtgcggtactgtttttcttcacccgctcggtcggtacgatccccgttaccgccagaccaaaaatcggctccggcgcatcgatggagtgaccgccagccagcgcaatacccgcctgacgacatgcatagcgtccaccttcggtcacttcgcgggcaatttctggggaaagtttgttaatcggccagccgaggatcgcaatcgccataatcggtttgccccccatcgcgaagatatcgctgatggcgttagtcgccgcaatgcggccaaaatcgaaaggattatcaacgatcggcataaagaagtcggtggtactgataacgctggtgccattgcccagatcgtacaccgccgcatcgtcgcgggtttcattacccacaagcaaattcggatcaacaaacttcgcctgctcactatgcaggatggtttccaacacttttggggaaattttacagccgcaaccagctccgtggctgtattgggtcaaacgaatcgagttctcgctcatggacatctcctgtcaatgcaatccgggtatggtaaccctcattccgtgaagtgataagtgagagtgtctgaattcctgcgcctttgctcacaatccagacagtttcgcgacaattatcagaaataagttacaaacggcgtcgggtccgggacgttaatcgacgtagatgctttcagctgcggcgtaccgaggtagagaaaaccgacaattttatcctgctcacggcaaccgaatgcttcacgcactaccggactttcagttaatgcgccactgcgccagatgccgccaaacccctgggcaactgctgccatttgcatcgccatgaccgcgcatccggcagacatttcctgttcccagcgcgggactttatgattctcttcgcatttcgccaccaccgtgatgatgagcggtgcgcggaacggcgcattacgggctttgtcgatagctttgtcatcactaccggcagcaatcgccccctgttccagtacggcgctgaaacgctcgcgcccttccccttcaatcacaaaaaaatgccacggttgcatggacttatggtccggcgcacgcatacccgcacgcaggatgttttgcagttgttcacccgttggcgcgggttcagccaagcgggaggcgctacggcgattgatcaatagttcgagtgcatccatttgattaactcctgtcgtgatatttattcacaaaattaacacgagagtggattttgttacagcacagtccgcaattcctgctgacaagtaccggttgggtcattacgataaccacatctattgcgcctgtgacaggtgtgaccttaagttgggagaatacatgcgaaccctttggcgatttattgccggattttttaaatggacgtggcgtctgctgaatttcgtccgtgaaatggtacttaacctgttctttattttcctcgtactggttggtgtggggatttggatgcaggtcagtggtggtgattcgaaagaaacggccagtcgtggcgcactgctgctggacatttctggtgtgatcgtcgataaacccgacagttctcagcggtttagtaaattaagccgccagctgcttggtgccagttccgatcgtctgcaggaaaactcactgtttgatatcgtcaacactattcgccaggcgaaggacgaccgcaatatcaccggtattgtgatggatctgaaaaacttcgcaggcggcgaccaaccgtctatgcagtacatcggcaaagctctgaaagagtttcgtgacagcgggaaaccggtttatgccgttggcgagaactacagccaggggcaatattatctcgccagtttcgccaataaaatttggctgtctccgcaaggcgtggttgatctgcacggctttgccaccaacggtctgtactacaaatcgttgctggataagctgaaagtttccacccatgtgttccgcgtgggtacgtataaatctgccgttgaaccgtttattcgtgatgatatgtcaccggcagcccgcgaagctgacagccgctggattggtgagctgtggcaaaactatctgaatactgttgccgctaaccggcagatccctgctgagcaggtattccctggcgcgcaagggttgcttgagggtttaaccaaaaccggtggcgataccgcgaaatatgcactggaaaacaagctggtcgatgcactggcatcgagtgcggaaatcgaaaaagcactgaccaaagaattcggctggagtaagactgataaaaattatcgcgccatcagttattacgattacgcattgaaaacgccggcagataccggtgacagcatcggtgtcgtctttgctaatggcgcaattatggatggcgaggaaactcaggggaatgttggcggtgataccactgcggcacaaatccgcgacgctcgccttgacccgaaagtgaaagcgattgtcctgcgtgttaatagcccaggcggcagcgttaccgcgtctgaagtgattcgcgctgaactggcagcagcccgggcagcgggtaagcctgtggttgtatcgatgggcggcatggcggcatctggtggttactggatttccacgccagctaattacattgtggctaaccccagcaccctgaccggttctatcggtatcttcggcgtgatcaccaccgtagaaaatagtctggattcgattggtgttcatactgatggtgtctcaacttcaccgctggcggatgtttctatcaccagggcactgccgccggaagcgcagctgatgatgcagttaagcattgagaatggctataaacgctttatcacgctggttgctgatgcgcgtcattcgacgccggagcagattgataaaattgcccagggccacgtctggaccggtcaggatgcaaaagctaacgggctggtcgatagtctcggggatttcgatgatgcggtcgccaaagcagcagagctggcaaaagtgaaacagtggcatctggaatattacgttgatgaaccgaccttcttcgacaaagtgatggacaacatgtctggttctgtccgggcaatgttgccagatgcgttccaggccatgttacctgcaccgctggcctcggtagcctctaccgttaaaagtgaaagtgacaagctggccgcgtttaatgacccacaaaaccgttatgcgttttgcctgacctgcgccaacatgcgttaagtcttgtactgagtggccgacagatcgtcggccacattattttttacgtcgacgaatcctcttcccgctgtttcgccccatatttccttatccgcatagtatcaggtgcgctccccctgcctcacgtatatacttttgctctttcgatatcattcatatcaatatcatgcaaaagaaatcaatttacgttgcctacacgggcgggaccatcgggatgcagcgttccgagcagggttatataccggtgtcaggtcatctacaacgccaactggcgctgatgccggaattccatcgcccggagatgccagatttcaccattcatgaatatacgccgctgatggattcttcagatatgacgccggaagactggcagcatattgctgaagatattaaagcgcactatgacgactatgatggttttgtcattctgcacggcaccgacacgatggcgtataccgcctctgcgctgtcgttcatgctcgagaatctcggtaaaccggtcattgtgacagggtcacaaatcccgctggctgagttacgctctgacggacaaattaatctgctgaatgcgttgtacgttgcggcgaattatccgatcaacgaagtaacgctctttttcaataaccgattgtatcgcggcaaccgcactaccaaagcccatgccgatggttttgatgcgtttgcctctccaaaccttcctccgttactggaagcaggtatccatattcgtcgtttgaatacgccacccgccccgcacggtgaaggggaattaatcgttcatccaatcaccccacaaccaattggcgtagtgacgatttatccagggatttctgctgacgtcgtgcgcaattttctgcgccaaccggtgaaagcattgattctgcgctcctatggcgtgggtaatgcgccacaaaacaaagccttcctgcaggaattacaagaagccagcgatcgcggtattgtggtggtcaacctgacacaatgtatgtccggtaaagtgaacatgggtggttatgccaccggtaacgccctcgcccatgccggcgtaattggcggtgcagatatgactgtagaagccacgctaaccaaactgcattacctgcttagccaggaactggatactgaaaccattcgcaaggccatgagccaaaacctgcgcggcgaactgacgccggatgattaaggagactgtaatgccccctcgcgccctgttactggtcgatttacaaaatgatttctgtgctggtggcgcgctcgccgtgccggaaggtgacagtacggtggatgtcgctaaccgcctgattgactggtgccagtcgcgcggtgaagcggttatcgccagtcaggactggcacccggcgaatcacggcagttttgccagtcagcacggtgtagagccttatacgccaggccaactcgacggtttgccacaaaccttctggccagatcactgtgtgcagaacagtgaaggcgcacaattacatccgttactgcaccaaaaagcgatcgcagcggtgttccataaaggcgaaaatcctttagttgacagttacagtgccttttttgataacggccgtcggcagaaaacctctctcgatgactggttacgcgatcatgaaatcgatgaattgatcgttatgggcctggctactgactattgcgtgaagtttaccgtgctggacgcgttacagttaggttataaggtaaacgtgattaccgatggttgtcgtggcgtgaatatccagccccaggacagtgcgcacgcgtttatggagatgtcagcagctggggcaacgctatatacgctggcagactgggaagagacacaggggtaattttacgctggcctacaattctgtactggcattgtaggccaaataaaacacgtcagtggcacatctggcaattgatgccatcaacgaaagatttaattcacctcagaaatctcttccaacgacaccttccgcgtttcgatgccaaaaatggagagaaccagcgcacagagcaataacataacaccaagtaccataaacaccgtgatcgacccataatgtgttaataatgccgcaacgccatagggcgtgaagactgcgacgatccgtccgacggcattaacgaaacccgaaccgcgcaggcgtaaatgcgttggccaaagctccgggatataaaccgccgacgcgaagcaaacatacatgtataaaaagaagatcatcaccagtccatagattaaaatcgcccactctgtagtctgaattgaatagatatagcctaacacggcaataataataagtaaggtggagccaaataaccgacgaggaaaatgatcaataattaatgccgcaataaatattcctaccggagcgccaatcataataacagcggtcattaatattgatttatcgacatcaatgccggagttaacaaatatggtcggtatccatacggtgatggtataaagcgaaatgttcattgcaattaaaacagtaatcgcgactaatgtacgtcgtaacatttcacctttaaacaggagccagaaagtacccttgattactttaaccttgctgttgctctgatacgaagtaagcgggggtaaacgaatactcttctctctttcaatttgctgctctacttcacgaagttggcattctgcacctgcgatttgccctttccctgccagccatcgtggcgactcgataaagtatttacctgagagaaaccaggctaacagtatgccaataccacccagcagaaacattattcgccaactaaaaaaagcgataaccaccacgcctatcgccgcagacagcatgggcgaccagttaccaacaaatgagagccgcgcggaccattttccacgcaccgtcgcggggataaactccgtaaatgaggcatagccaaccataatcagcgcccccattcctgttcccatcaggaagcgaaagaagatgagccagtacatatcagggacaaaagcggcccctgttgcagcaataccgacgatgagaagatttatgcgaaacgccctgcgccgcccaaagtagtcaccaataaacccaccagtaagtgagccgatgaaataaccaaacattaatgccgaggtaaaggcggcattgaggaaattatttgaccatccattgcttaccagctttgctaagacgacattaccggagtaactcaaaaaccctgttaataacagactaaagcttataataccaaatatacgataatgaaaccgggccaaaggcaagcggtccagtcttgcgccaatttgatcatattgttccattaggtgcctcggatttgctaaaaaggtagcaattgcggcaaattcacttgccgcatctttatcatcattttatttcaaggcgcaggaacaaataatattgacaacgtgtgcttaaattaccacaccagctggatattattgtctttgcaaaatgctatccactctgcacccggtgatttatcagttattatgtaattaatatgactaaaatcagctaactggacaaaagctttgcgatcaaacttagagtgatcaaccaataacgcaacttctgtcgcctgacggatcattgtctttttgatttcagcttccgcttcattagagtccagcgcgccgctgttaatatcaagacctttacaactcattaccatgatatcgacatgatagcgcctgatgatctctttagtaattcttccttgcagtgaaagtgtatttttgtttagttccccacccgttgaaacgactttaatttctgactgagccagaacatgaatcgcttccgccgagttggttagcaacgtcaggccactacggtcctgtaacaatttgagcaattccattacggtactactggaatcggctgccatggtggttttattgtcgataaagggtagtgccttgcgtgcaataagctgcttctcttcataaaacgatgaagcgcgcttataaaaatggatattctccgtcaacatcgctgtatttaaaacagcaccaccataggttctggtcaaaaagccttcatcttccagcttctcaagatcgcggcgaatggtttcttcggttacctgaaaaatcccactcaaatttgagactgtcacctttttatcgttggcaaccatttgcttaattgcctgaatcctgtcttttgccgccacgattacacccctgtatctttttacatcacattagcgcgattatcgcataaccgatgtttactttcaaaataacctgtttgaatcacagattttcatcacagttttcacagaaacagaggtgaatcgtgttgagtatttaacgctccagggcctctgccatttccctcatcaatgttgcgtctgcatccgataagttgatattcagtgccgcgacattttcgcgtacctgttccggtgcagtagccccactaagaatggagattaaatcactctgttttaatatccacgccagtgccagagtgggaattgtgcactgataacgagcacaaagtggctgccactgttcaagcatatcaatcactttcagcatgttttcacgctggaaccagactttatttgcccgagcgccgcccggaacgtaatcacgagtgatggtgccggtcaacaatccctgctctagcggggaataaacctgaaccacaatgccattatcacgacatagtggcagcagttcgttttccattgcccggtcgaggatactgtatttcgcctgaataatatccagttcaccatattgcagatactcgcggatatggtcagcatcgacgttagcagcgcctatagcgcgaattttcccttcagactttaactcattaagcactgcgacagtttcagcgatcggcgtaaaaaatggcggcaccgactgccagtgcgtcatgtagatatcgatgtaatcaatacccagacgttgcaagctcgctgctacctcttcgcggatagattccggggaaaggtttttatacaactgccgatcgccaactttgttgaataaacttccttttcgttcccagacaatgccgcatttggtttctactacaacctgttcacggggcagtttttttaacgcctgaccgacgataacttcactattgccaaagttatatcctggcgcagtatcaatcagattaatgccacaacgatgggcttcaagaatcgtatcaatacatatttgccgatcgagatcgccattccatgcaggaccgccgccaatggcccatgtccccaaccccattcgcgaaagcgtaatatccgttgtgcctaaaggtatctttttcatttgccttcattatccttcgtattcttccagcaattgttcgaccagctttctgttttttacgccggtggtggcaccgacgcttagaaccgagatagccgccgttgcattggcaaagcgtgcgcattcacgcagatttttgccttctaacagtgccgcaataaaacctgaagcaaagttatcgcccgcgccaatggtgtcgatggcggttattcctgcgaccgccggcaccttcatcgtcatgtcaccacgcttgataaagcagccgtctttacccgttttaatcaccaccgtttttacgccgcacgcaagaaagcagtcagcaatttcatccagtgtctctttcccggtgagtaattttgcctcggcaaaattaggaaacagataatcgacataactcaatgcttcgcaaatatcatccagcgtttcattcaaccgcggtttgatcatatcggcacagataatcatctgccgggctttagcttgcgtaaaaatttctgttagcgctttaccatccaatagtggactgttgaaaatactggccagtgataataatttcgcctgagaaaaccgcgcaaaatcaacatcgtcaatattcaatttccacagactgccattacggtttgtgacaaacgtccgctcgccatcctccgtcaccagtccaacgttaatagaggtatctatgctgacgtcctgcttcaggctttgaatatcaatattctctttgcggcaatggtcgagaataaattgccctgcggcatctttaccaatacgactcattaatgctgtgcgatggcccagacgagaaataattgttgcttcatttattgcatcacccccggtggtcattgcgattctttcaagaggataagaatccacatcaaagatatttttactgaccggttgcaatggaatatcaacaatagcggcacctatacaaataacgtcgagattatccatatcattattccgctttgccatcagaaccgaacagtttaattttttccaatgcccgttcttttacagctttacgtacttcacgttctaaatgcaggaaaggctgatcctggttttctttcactgcaaccattgcggcctgacagagctccgtatgaatgttgattttcgcgatacccaacgaaattgcagttttaatgtcggcatcactgatccccgatgcaccgtgcaaaaccagcggaacagaaacggcatcgcgtacgcgtttgacgacctcaaagttcaattgtggctctgacgtataaaccccatgctggttgccgatggcgacagccaatgaatcacagcccgtacgttcaacaaattcagccgcctggtcaggatcggtatagtgatagcccgccagcgcttcctcataaacggtttcattaccgacatgccctaattccgcctctaccggaatacccagcggatggaagaaatcgacagcctctttggttaaacgaatattttcttcgaaatcaaacgcggaagcatcacgcattaatgaattcataccatgagtccaggcgttatgaataatctccatactccgaccatgatcccaatgagttattaccggcaccgttgctttttgtgccattgataccatcatgtgagagaaatcttcaaatgaggtgttaccgacaaaacctgtaccaaaagaaataataaccggggatttcgcttcttcggctgcgtcgataacgcccatcaacatttctgcattccatacgttaaaatgggcaattgcataatgtttatttgtggcatcgttttcccaatatctgatatctgcgagcatgttctgttctcccgtattaattaatcgctaattttaataacgcctttaataatgtcgcgtttgttgttaactgactcttcaaatgcctgttgtacatcccgataatcgtaaatatgcgtcaccatcgatttcacatcgaatcgccctgaagaaatagcttcaatcgtgaccggataacgattggcatagcggaataccgtctggatagtgacttcgcgattgattttgaggaaattgattgccgaatcgccgggtacagtaccaacaatcataattttaccgccgcgcattaccagataaggtgcctgtttaacggtgaccgcagaacccgctgtttcgaaaacaatatctgcgcccatgtcttcggtaaattgctgacagcgtgcaatagtgtcttcttttgcgccgttaataaccactgtcgcaccaagctgttccgccattgccagacgtttttccagcacatcaacgacggcaatttccgttgctcccaggcatttgcacgcttgcaacgtcatcaaaccaatacaacctgctcccagaataattatcttcttacccggtttaacatctgccagcatcgcggcatgcatcccgactgcggcaggctccaccagcgccccttccatcgtgtccatattgtcgggcagtttgtaagtaaagctctccggatgacacagatagtgcgttaatgcgccgcggtagttgggttgtgtcgccataaaatcaacgtccgggcagatgttatatttgccttccagacagtaacgacagtgaccgcaaggaacgccaggttcgatatttacccgatcccccggtttaaatttgcgcacgcggcttcccacagccacaaccgtcccggcgcattcatgacccaggccaatttcttgatttgggtctttaggcggaataaacgggcctgattcaaaaccatgtacatctgaaccacaaataccgacatattctactttaatcaaaacttcatcttctttaggcactggtatttctgctgaaataattttcattgtgcccggcacctgcaatattgcttttgaatttttcattttgaatccacccgtattatttattggctactgcatcaatacttaaactttcaacggagacacctttggtttcgattccaatggtggcgatagcaattgcgacaataattgaaaccgcccccagaagaataaagactcccgtaacgccataactactgagcagcactgcaacggcataaggtgcggcaataccactgattcgccctaccgcattcgccagaccggagccacggagtttggcctctgtcggccagatttcagggacatacactgccgaggcatagcaaacgtacatatagacgaaagtaatcaggaagaaaccaatcaacgttatgagcaacatactggtttgcagtgaatagatatatccgagcaccgcaatcaggattaatagccccacacccattgttttacgcggaattttatccatcaccagcatggcaataaaaataccaaatggcgcgccaaacatactcatggtatttaaaacaatcgagtcttttaaattaatcccctgggtcatgaatattgttggcaaccagttaattagtgtgtactgcacaacgttcatggcaatcagcacacaagagcctaatatcacgcgtttcagtaatactcctgtcagtaaggctgaatacggcaccgcttgtggcgctttaccgtcatcagcaataaccacaggcggcaaaggtttacccgtctggcgtatgacgccttcttctatactccgcatgactttctcggcttcctgataccgtccgcgcgattccagccagcgcggggattcaggaaagtagcgccaggccagcgccgtagcgataagcgacaatattgcagggataagcagttgtacccgccagttccactctgcactaatcagcggcgtgagtcccatcgctatcaatgaacagagcggatatgaccagttgccaataaaggaaacccgacttgaccacgttccacgatttctaccgggcatatattcggtgaaaccagcaaacagcgtaaccagtaaagctcccagcccaactcccatcacaaaacggcaggcaataaggaaatccatattcggtgagaaagcaccgacaaccatcgaggcaatatgaatggcctcatagaggatgaacgcatttctgcgaccggttttgtcgccaatgatgccgcccaccagcgcaccgagaaacattccggcggtcgtgattgctgagaatgtggctgtggtggaattatctgtccagcccaacgctttcagctgcgcgaggatcaagccaccaacggcattactccagcagacaagcaagccaaacgcgacgatggcaaacattgatgaatgccagcggcaatccggtaagcgatccagccgtgcaccacaatgcggttttgttatctgttccatgcgataacgttccttcaggagagtggttattcatcaaagtcgtaagtcatgatcactttgattgcggttttatcgaccatcgcatcaaacccttcgcgccattgcgacaggccgatacgatgcgtgatcatcggtttgactttgatagcgccgctggctaatagcctgatagcgttacgccatgaggtggagtcataggccatatgcccaatgatgcttttgttccaggcggtaatgtcattaatcgagaaatcaagaggtttgaagcccattccaacgcgtaccacttccccgttcgggcggagcatttcgatggcttgtttcagtgcgatattggcaccggagcattcaatcaccagtcccagattgtctttgccacaaatttgctggcagcgcgccaccacatcttcggtagaaccatttactactgccgtcgcacccagttcttttgcaaccgggaagcggaccgccacatcttcttgcagaccaacgacgacgatatttaccgcccccataattcgcgccatttgtacggagaacagcccgagtgggccagtgccgatgacgaccacatcctgaccaggaaggaatttcgattgctgcgcgatggatttgtaggcattacagatagggtcaagtacggctgcgtcctcataatcaacaccatcagggatttcccacaacgcatgacgatgaattttgagaatttcaccaggaaccagacaatatttggaaaaaccaccgccccaggtattattatccagaccaaggtttactttttctgtacaacacagaaaatcaccttgttcacaggccggacaaacaccgcaaacgtgaccgctgttatccgatacgacgcgttgccccactttccagtctttgactttttcaccaacctgcgcaatacaacctgcgaactcatggccgcggatagagttaaactcatcagaaccgctatcgacattgtagtgcttcatgtctgcgccgcagattgccgcggctttaatttcaatcactacatcttccgggccacacatgggttgtgggacatcaatcatcttgtagccgccaaaggccttgccaaaccgagccagtgctttcattgcgtcatcctctgtgtttagttttgcttagatggccatcatacttacccacatgatttttgaggtcaacattaaatctgtaaaacacagataatgatctgcgttttacaactcagatcacaattacgcagaaaatggctgggtctgttacaggttgatggaaggcggggcgcaaaaagagcaaattcgagagggattaccggccaaataggtctgagacttaagttcaggagaagtcattcaggtgtgaacgggacggcaagagatcggactgggacttagccaggtcatggcgagataattgagatgagtcgtggggtcattgttggctatccccttcatagccgaggcaaaaaggggatgaaccacttacttaaacatggcaataggctttgctgagataccaaaatcttcttttaactgctgtttgctcttcatgaccatctgaccatttgtgtcaattgtcatatgctgtgcttcgatattatggcgggcttgccacagcatcaccagttgcaggcagttctctttttgttcctcggtcaacgcaacgccatcaggccatttccccagttcaacggcggtcgacaaacgctggtatacctcaggcatcatgctgttgataatgtcatcaagattcataatttttccgctcctgtggaataagttgctgaatcgttttttcaaccgttgatttcttcgccgttttcgccatcggtaaagcgtaaagaggcagagttaacacaataacgttcgcccgttggctgcggcccgtcggggaagacatgccccagatgggcatcacagttaccgcaacgaatttctatgcgctgcattccatgtgacaagtctttgatataacgaatggattcttcacttaccggttcgtagaaactgggccagccacagccggaatcatacttggtttgggaatgaaacagcggggcatcgcagatcaaacagtgatatacgccgtcacgcttgttatgcagtaaacgacccgtaaatggcggctctgtcccatgattctgcgtcacgtaaaactgcatctcggacaaattttttttcagttcttctgccgaaggtttattagccatttgctcacatctcactttaatcgtgctcacattacgtgactgattctaacaaaacattaacaccaactggcaaaattttgtcctaaacttgatctcgacgaaatggctgcacctaaatcgtgatgaaaatcacatttttatcgtaattgccctttaaaattcggggcgccgaccccatgtggtctcaagcccaaaggaagagtgaggcgagtcagtcgcgtaatgcttaggcacaggattgatttgtcgcaatgattgacacgattccgcttgacgctgcgtaaggtttttgtaattttacaggcaaccttttattcactaacaaatagctggtggaatatatgactatcaaagtaggtatcaacggttttggccgtatcggtcgcattgttttccgtgctgctcagaaacgttctgacatcgagatcgttgcaatcaacgacctgttagacgctgattacatggcatacatgctgaaatatgactccactcacggccgtttcgacggtaccgttgaagtgaaagacggtcatctgatcgttaacggtaaaaaaatccgtgttaccgctgaacgtgatccggctaacctgaaatgggacgaagttggtgttgacgttgtcgctgaagcaactggtctgttcctgactgacgaaactgctcgtaaacacatcaccgctggtgcgaagaaagtggttatgactggtccgtctaaagacaacactccgatgttcgttaaaggcgctaacttcgacaaatatgctggccaggacatcgtttccaacgcttcctgcaccaccaactgcctggctccgctggctaaagttatcaacgataacttcggcatcatcgaaggtctgatgaccaccgttcacgctactaccgctactcagaaaaccgttgatggcccgtctcacaaagactggcgcggcggccgcggcgcttcccagaacatcatcccgtcctctaccggtgctgctaaagctgtaggtaaagtactgccagaactgaatggcaaactgactggtatggcgttccgcgttccgaccccgaacgtatctgtagttgacctgaccgttcgtctggaaaaagctgcaacttacgagcagatcaaagctgccgttaaagctgctgctgaaggcgaaatgaaaggcgttctgggctacaccgaagatgacgtagtatctaccgatttcaacggcgaagtttgcacttccgtgttcgatgctaaagctggtatcgctctgaacgacaacttcgtgaaactggtatcctggtacgacaacgaaaccggttactccaacaaagttctggacctgatcgctcacatctccaaataagttgagatgacactgtgatctaaaaagagcgacttcggtcgctcttttttttacctgataaaatgaagttaaaggactgcgtcatgattaagaaaatttttgcccttccggtcatcgaacaaatctcccctgtcctctcccgtcgtaaactggatgaactggacctcattgtggtcgatcatccccaggtaaaagcctcttttgcattacagggcgcacaccttctctcgtggaaacctgcgggtgaagaagaagttctgtggttgagcaacaacacaccgttcaaaaatggcgtcgctattcgcggtggcgtaccggtttgctggccgtggtttggtccggcggcacaacaaggtctgcctgcgcacggttttgcccgcaacctgccgtggacgctgaaatcacatcatgaagatgctgatggcgtagcgctgacttttgaattgacgcaaagcgaagagacgaaaaaattctggccgcacgactttacgctgttagcgcatttccgcgtgggtaaaacttgtgaaatcgatcttgaatcacatggcgaatttgaaaccacctctgccctgcatacctactttaacgtgggtgatatcgctaaggtaagcgtcagtgggctgggcgatcgcttcattgataaagtgaatgacgcgaaagaaaatgtactgaccgatggtattcagaccttccctgaccgtaccgatcgcgtgtatctgaatccacaagattgcagcgtgattaatgatgaagcgctgaatcgtattatcgccgtaggccaccagcatcatctgaacgttgtcggctggaacccgggaccggcgctttcaattagcatgggcgatatgccggatgatggctacaaaacatttgtttgtgtagaaacggcttacgcttcagaaacgcaaaaagtgaccaaagagaaacctgcacatctggcgcaatccattcgcgttgcgaaacgttaatttacgttaatgttgtgtgccgggtgcaatgcatccggcacacaacatcacaccatatccagcgcagtttttccttttggtgccggatatgccttatccagcatagctaattccgctgaagaaagttcgacctcaagcacagccgcattttgttggacatgggcaatcgtggccgcttttggaatcgccatcacaccctgatgactgatcacccacgccaacaatacttgtgccgcgctgatattgtgagcatgtgcaatttcgttgactaccgcgttttttaacagtccattgcgcaaccgcccggcctgggctaacggactgtaagccatcaccggcatctgctgttgctggcaccaggggagtagatcgtactcaattcctcgtgaaccgagatggtaaagcacctgattagtggcacactgatttccccccggcagctgccagagttcctgcatatcagcataatcaaggttagaaacgccccagcggcggatttttccctgggcgatcaatttttccatcgctgcgacagtctcttcaaaagcgaaactgccagaccagtgtaataagtaaagatcgagataatcagtattgagacggcgtaaactggcttcgcatgcatttatcgctttttgcccgccagcattccacggatagactttagagacgagaaagaccttctctcgcagaccggttaatgcttccccaaccaccttttcggcaccgccatcggcatacatttcggcggtatcaatgagggttaaaccgagttcaatgcccgcgcgtagtgcagcaacttctgttttgcgctgactggcatcttcgcccatataccatgttccctgccctacggctggcagtgagacatcgccactaaattgaatcattttttgttgcattgtttcctcccaggtattgcaccaccgtaatgcaaaacagggcgtgacgccctgtttttatgcacaaaatgccctggaaagatgcattatcagaatttgtaggtgatcccggtagaaatcaggccagtccaggatttatccaccatcgggctgtcagtaacttcatcagacagacgggtgtagcgtgcggtaccgtaaacactccagtcgccgaggaagttgtagctggcgctcagctccaggtaagggctccagctgtcgttcgggttatagccacgcagaccgctgcgagcggactctttgcgcgatacgccataatagtattcgttctggttttcgctgttccactgcacaccaatacccggagtcacggtcaggccaccgttggtgtaacgatacaaccaggccatatcccagacgatgccgttgctgttatccagggtatcgccagccagggtggtacgcaggtaaccgtactgggtaaagtgagcataagacagaccagccatcatggtgctcttacggtcatccaggtgacgcatttggtgatcgccactgtctttcgctttgaagtaaagcggcgaccagtaagcggtaattgaaagtttatccgttgcgtcattccacaggtagtaaccaccacctaagccacggaaccagaagttatcgccttcatagttgattaccggtactgggtaaacatcggtatcgtaatctttatatgggtgttcaacgacacctacgcctgcgcccagggaaaatttaccttcagcgtgcgctacgcctgcagacgttgcgataagcactccaagtgccagaagtttgagtttggtcacaattaatcattccttaaacaaatgtttagcgggcgacaaagtttacccgtcaatacatcgaaacccaacctttttacgttttcattttttaaagtaactgtttaattttcctgacgcggatgacaccgcgcttacagccaaatgaatttagcgttactggcgagcctggtctttacattaattatgcaaaatttatggatgagttgttgatatgccattgaaattaagaaagccgtgcaggcaagttttccatttgccatctacgcttaattttgaaggtgtatcaccgggcacgttgttctcatcgtcgataaaatggcatgagagttgctgtgttttagcaagagacgtcgttcagtttacctcttccgggagcctctactattcatatgaacggctcttaacctgtgctaaaaaacgaaaggacggcataccatgaatatattcgatcactatcgccagcgatatgaagctgccaaggacgaagagttcacactgcaggagtttcttaccacttgtcggcaagatcgcagtgcttatgccaacgcggctgagcggctattgatggctatcggtgagcctgtcatggtcgatacagcccaggaacccagactttctcgactcttttctaaccgggtcattgcacgttatccggcgtttgaagagttttacggcatggaagacgcgattgaacagattgtctcttatctgaaacacgcggctcaggggctggaagagaagaaacaaatcctgtatctgctggggcctgtgggtgggggtaaatcatcgcttgctgagcgactgaaatcattaatgcagctcgtaccgatttatgtattgagcgcgaacggtgagcgtagcccggtcaacgatcatccgttctgtcttttcaatccgcaggaagatgcgcagattctggaaaaagagtatggcattcctcgccgttatctcggcaccatcatgtcgccgtgggcggcaaaacgcctgcatgaatttggtggcgatatcactaagttccgggtagtgaaggtctggccgtcaattctgcaacaaattgctatcgccaaaacggaacccggcgatgagaacaaccaggacatctccgcgctggttgggaaagtcgatattcgtaaactcgaacactacgcgcagaatgacccggacgcctacggctattccggtgcgctgtgccgcgccaatcaggggatcatggaattcgttgagatgtttaaagcaccgattaaagtgctgcatcccttgttaaccgccactcaggaaggtaactacaacgggacggaaggtatctccgccctgccgttcaacgggattattctcgcacactcgaacgagtccgaatgggtcactttccgtaataacaaaaacaacgaagccttcctcgatcgtgtttacatcgtgaaggtgccgtattgcttgcgcatttccgaagagatcaaaatctacgagaaattgcttaatcacagtgaattgactcacgccccatgcgcccctggcacgctcgaaacactgtcacgtttttccattctttcgcgcctgaaagagccagaaaactccagcatttattcaaagatgcgggtttatgatggcgaaagtctgaaagacaccgatcccaaagccaagtcgtatcaggaatatcgtgactacgccggtgtcgatgaagggatgaacggtctgtcgacgcgttttgcgtttaagatcctctcccgcgtgttcaacttcgatcatgtagaagtggcagcaaacccggtccatctgttctacgtcctggaacagcagattgagcgcgagcagttcccacaagagcaggcagaacgctatctggagttcctgaaaggttatctgatcccgaaatatgccgagtttatcggcaaagagatccagacggcctaccttgaatcctattccgaatatgggcaaaacattttcgaccgttatgttacctacgcggatttctggattcaggatcaggagtatcgcgatccggataccgggcagctgtttgaccgcgagtctcttaacgccgagctggagaaaatcgagaaaccggcggggatcagtaatccaaaagatttccgcaacgagattgttaacttcgtactgcgcgccagagcgaataacagcggacgcaatccgaactggaccagctatgaaaaactgcgcacggtcatcgagaagaaaatgttctccaataccgaggagctgttgccggttatctcgtttaacgccaaaacgtcaaccgacgagcagaagaaacacgacgactttgtcgaccgtatgatggaaaaaggctacacccgtaaacaggtgcgtttactgtgcgaatggtatttgcgcgtacgtaaatcgtcttaacaaccctggcccggtacacatgttaccgggcctacaacgacagcgaaccgtgggcctgagaagcggcaacacaggcgtagcatacagttggcaaatgtagtacggggggcatatgacctggtttattgaccggcgtctgaacggcaaaaacaaaagcatggtgaatcgccagcgttttttacgccgttataaagcgcaaattaaacagtcgatctccgaggccattaataagcgttcggtgactgacgtcgacagcggcgaatccgtatccattcccacggaagatattagcgaaccgatgtttcatcaggggcgtggcggtctgcgccaccgcgtgcatccgggcaatgaccatttcgtccagaacgaccgaattgaacgtccccagggtggcggcggaggttccggcagtggtcagggccaggccagccaggatggtgaaggtcaggatgaatttgtctttcagatttcgaaagatgagtatcttgatctgctctttgaagatttggccttaccgaatctgaaacaaaaccaacaacgccagctgaccgaatataaaacgcatcgggcgggttataccgctaacggcgttccggccaatatcagcgttgtgcgttcattgcagaactcactggcgcgacgcacagccatgacggcaggcaagcggcgggaacttcatgcactggaagagaatttggccatcatcagcaacagtgaacctgcgcaactgctggaagaggaacgtctgcgcaaagaaattgcagaattacgtgccaaaattgaacgcgtcccttttattgacaccttcgatttacgttacaagaactacgagaagcggcccgatccctccagccaggcagtgatgttttgcctgatggacgtttccggttcaatggatcaatccactaaagatatggctaagcgtttttatattctgctgtatctgttcctcagcagaacgtataagaacgtggaagtcgtatacatccgccatcatacccaggcgaaagaagtcgatgaacatgagtttttctactcgcaggaaacaggcggcaccattgtttccagcgccctgaaactgatggatgaggtagtgaaagagcgttataacccggcacagtggaatatttacgctgcacaagcatcggacggcgataactgggccgatgactctccgctttgccatgaaatcctggcgaaaaaattattacctgttgttcgttattacagctatatcgaaattacccgtcgtgcacatcagacattgtggcgagaatatgagcatctgcaatctactttcgacaactttgcgatgcagcacatccgcgaccaggatgatatttatccggtgttccgtgaactgtttcataaacaaaatgcaacagctaaaggctaaaactatcagccaggtcattatcgcctggctgatttttagcttactgtaaattatctcatttattacatacattagcttacaatcgctttaaatatgacagcataacctttacataatttagttccagaaaacaatcattcggaaaaatgattcagtcaacacgtatttccatggggttattctttaaatattttttatcgttaacgaaaattgatcctggtcaaaactatatatctctgccatcaataaaatccagcactcacattgctctcctttttatggtttctatgggtacacaaaaattaaaagctcaaagcttttttattttcagtttattgctgacgttaattttattttgcattactaccttatataacgaaaacacaaatgtaaaactcatcccacagatgaattacctgatggttgttgtggctttgtttttccttaacgccgtcatttttcttttcatgttaatgaaatatttcactaacaaacaaattttaccaacactcattttaagccttgcatttttaagtggccttatctatttagttgaaaccattgtaattatccataaaccaattaacggcagtacactgatccagacaaagtcgaatgatgtttctattttctatattttccgccaactcagttttatttgtttaacctcgctggcgctcttttgttatggaaaagacaacatccttgacaacaataagaaaaaaacgggaatcctgttgctggcgctgatcccttttttagtttttccccttctggcacacaatctgagcagttataacgctgactattctttgtatgtcgtcgattactgtccggacaaccatactgcgacctggggaatcaactatacaaaaatattggtttgtctgtgggcatttttactgttctttattatcatgcgcacacgattagccagcgaactatggccgttaatagcattattatgtctggcatcgctatgctgcaacttacttctactgactctggatgagtataattatactatctggtatatcagtcgcgggattgaagtttccagtaaactgtttgttgtgtcttttctgatttataacatttttcaggagctgcaactctccagcaaactggcagttcatgatgtgctgaccaatatttataatcggcgctactttttcaacagcgtagagtcattattgtcgcgacctgttgttaaggacttctgtgtcatgctggttgatattaatcagttcaaacgcatcaatgcccaatggggacatcgtgtgggtgataaagtgctggtttcaattgtcgatattatccagcaaagcatccgccccgatgatattttagcgcgactggagggtgaggtgtttggcttgctatttaccgaactcaatagtgcccaggcaaaaatcattgcggaacgtatgcgtaaaaatgtcgaactcctgaccggctttagtaacagatatgatgttcctgaacaaatgaccatcagtattggcacggttttttcaacgggtgacacgcgtaatatctcgcttgtcatgacggaagcagataaagccttacgcgaagcgaaaagcgaggggggcaacaaagtgattattcatcatatttaagtgcaaaaatattcagagccatgctttttgcgtggcttttgcatacaatttattactattacccctaaatttcccctccccagcggcgcagagatgagtataattagcgcccctgtgccaggccgcaatcgaactttatctggttttctcgtttcactaaccgaaggagtgccatttatcatgaaattgcaccatagaatgctccggcattttatcgccgcaagtgtcattgtgctgacatcttccttccttatttttgaacttgtcgccagcgacagagcaatgagtgcctatctgcgctatatcgtgcagaaagcagactcctcctttctttatgataagtatcagaatcagagtattgccgcgcatgtgatgcgcgctctcgctgctgagcagtcggaagtgtcgccagaacagcggcgcgccatctgcgaggcttttgagtctgccaataacacccatggcttaaacctgactgcccataaatacccgggcttacgcggcacactacaaaccgcatccactgactgcgacacaattgtggaagctgcagcactattacccgcttttgatcaggcagtggaaggcaaccgccaccaggatgattacggttcaggtcttgggatggccgaagagaaatttcactattatctcgatctcaatgaccgctatgtctatttttatgagccggttaatgttgaatactttgcgatgaataactggtccttcctgcagtcaggaagtattggcatcgatcgcaaagatattgaaaaggtatttaccgggcgtaccgtattgtcgagcatttaccaggatcagcgtactaaacagaacgtgatgagtttgctgacgccggtatatgtcgcagggcagctaaaagggattgtgctgctggatattaacaaaaacaatctgcggaatatcttttatactcatgaccgccctctcctctggcgttttctcaatgtcacgctaaccgataccgattcggggcgcgacattatcatcaaccagagcgaagataatctgttccagtatgtcagttacgtccatgacttaccgggcggcattcgtgtctcgttatccattgatattctttactttatcacgtcttcgtggaaaagcgttctgttctggattttgacggcgttaattttgctgaatatggtgcggatgcacttccgtttataccaaaatgtgtcgcgagaaaatattagtgatgcgatgactggactgtataatcgcaaaattttaacccctgaactggagcagcggttgcagaaactggtgcaatccggttcttcggtgatgtttattgctattgacatggacaagttaaagcaaataaatgacaccctcggtcatcaggagggggatttagcgattacgttattagctcaggcgattaaacagtcgattcgtaaaagtgattatgccatccgactcggtggcgatgaattctgcatcattcttgtcgattcgacgccgcaaattgcagcacaactgcctgaacgtatcgaaaaacgtctgcaacatatcgcgccgcagaaagagatcggcttctcttccggtatttacgcgatgaaagaaaacgatacgttacatgatgcgtataaagcttccgatgagcgtttatatgtcaataagcagaacaaaaacagccgttcatgataaccttctgtggttgtttgcttgtaatctcaggagcgtgaaatgactgaaatggctaaaggaagcgtgacgcatcagcggttaatcgctttattatcacaagaaggtgctgacttccgcgtcgttacccatgaagcggtaggtaaatgtgaagcggtgtcagaaattcgtggcaccgctctaggccagggtgctaaggcactggtatgtaaagtcaaaggcaatggcgtaaatcaacatgttctggcgatcctcgcagccgatcaacaggccgatctgagccaactcgccagccatataggcggattacgcgcttcgttggccagcccggcggaagtcgatgaactcacaggctgtgtcttcggcgcgatcccccctttcagcttccatccaaaactcaaactggttgccgaccctctactcttcgaacgatttgatgaaatcgccttcaatgcaggcatgctggataaatccgttattttgaaaaccgcggattatttgcgcattgcgcaaccagaactggtcaatttccgccgcactgcgtaactagccggtccgttcgataagaagaacggacaaaaccagtacaacagcaatggcaaaaaacgatgacgtgataatcagtgtctcgacaaacatttgatcgttcatagcatgcccccgggagatagctgttttcacgttattgttagcgtgcacaaatggcagtttgatgacagttcgcctgattttttatgcaaaaaacgtaaagattttctacttccttcctgcagcaagcgtaaagtaagcaggcttattattttttggcaaggaaaccacgatgtttgatgtcactttgctgatcctgctcgggttagctgcgctgggctttatcagtcataacaccactgtcgccgtttcaattctggtgttaatcattgtccgcgtcacaccgttaagcaccttttttccgtggattgaaaaacaggggctaagtatcgggataatcattctgacgattggcgttatggcccccatcgccagcgggacgctaccgccctcaaccttgattcactcgtttctgaactggaaatcactggtggcgattgcagtaggcgtgattgtctcctggctgggtgggcgcggcgtgacgttaatgggcagccagccgcaactggtcgccgggctgctggtaggcactgttttaggcgtagcgctgtttcgcggcgtaccggttgggccgcttattgccgcgggtctggtttcgctgattgtggggaaacagtagttaatctcgcaatatatcggcctggcgtttgccccaggcctttcttaaacatagtaataaaggccgttgttgaatcataccccagcgtatgagcaactttctgtacagtatcgcctttcactaatccctgaagcgccataatcagctgtaactgctgacgccactggcgaaaactcaaccccgtctcttttactatcagtcgggcaagattgcgttcactcatcgcaaaaaagccagcccattgccccaatgccccccactcgacaggccctttcgccatcatctccaccatcgtgcggattttaggatgagaagaaacgggcaggtgcagctgttgttgtggctgctgagggagttcatcaaacaggacctgaattaatctgcgggtcattggctcagcacgctgagtcgtcgtcctgtttgccagggttaaaattaattcccggcataagggcgatattttcaatgtgcaacatgttgtcggcattgtcactgcgctgggttcgataaacagaaaacagagttcagcattagctgttacttgattgctatgttccaccccgcccggtatccaaaccgcatattgtggcggcaccatccacaaagcattttccaccgtacaggtaattgcaccatgtagcgccagtatcagctgtcctttgcggtgctgatgtacaggactggttaactcatccgttccggcgtgaatacaaaatgcgaccgcggcttcatggtgtcggtcgggttcatagccattgagattcaacctgtgcatcattttgtccgaacttagcgataatttgtcattttagcttgattcaacataacaataaaaacggtaaggtacagcctcgtttgtaacaatgagaagcatatgacctgttcaacttcattaagcggcaaaaacaggattgtccttatcgctggcattctgatgattgccacaacattacgcgtcacctttaccggcgcagcaccgttactggatacgattcgttccgcttactcgctgacgacagcgcaaaccggcttattgaccaccctgccattattggcctttgcgctaatctcacctttggctgccccggtagcgcgacgttttggtatggaacgtagcctgtttgccgcgttacttttgatctgtgctggtatcgcaattcgctctctcccttcgccttacttattatttggcggtacagcggtcattggcggtgggattgcattaggcaatgtcttactgccaggattaattaaacgcgatttccctcattccgtcgccagacttaccggcgcatattccctgacaatgggagctgcagcggcactgggatcggctatggtcgtgccgctggctttgaacggttttggctggcaaggcgcgttgctcatgctgatgtgttttcctctgctggctctttttttatggctgccacagtggcgaagtcaacaacatgcaaatttgagtacctcgcgcgccttacatactcggggtatctggcgttcaccgcttgcctggcaggtcacattgtttcttgggatcaactcactggtctattacgtgattattggctggcttccggcgatcctcatcagtcacggctatagcgaagcacaggcgggttcactgcatggtttgctgcaactagccacagcagcacccggtttgctgatcccacttttcttacatcatgtgaaagatcagcgtggtattgcagcgttcgttgccttgatgtgcgcagtgggcgcggttgggctctgctttatgccagcgcacgcgatcacctggactctgcttttcggttttggttccggcgcaacaatgatactggggttgacgttcattggtctgcgggctagttctgcgcatcaggcggcggcactctcggggatggcacaatccgtcgggtatttgttggcagcctgtgggccgccgctgatgggtaaaatacacgatgctaacggtaactggtctgtaccacttatgggtgttgccatactttcactactgatggcgattttcggactttgcgccgggagagacaaagaaattcgctaatatccggtgctatagtgacgtaacaaatcatgcgtgaaagggagaacaaacacgatgaatattcagtgcaaacgcgtttatgatccggctgaacagagcgatggttatcgcatactggtcgaccgcctctggccgcgcggtatcaaaaaaaccgatttagcccttgatgagtgggataaagaaatcacgccgtcaacggaactgcgcaaagcctttcacggcgaagtcgtcgattatgcaacctttcgcgagcaatatcttgcagaactggcgcaacacgagcaagaaggaaagcggctggcggacatcgccaaaaaacagccgctgaccctgctctactcagcaaaaaacaccacgcagaaccatgcgctggtgctggccgactggctacgtagcttgtgattttagtacagcatccggcggttatttttcaccagccggatggtcacgccgccacaatgcccattcatcaatcgtttcaccgcccggtaatttgcaattgttgctgaccccttgcgctgtctgcactggaatgagcgtcccgcccttctgctggcaatagaccgacgccggatttgccataccaatctgcggcggtttaggtgcttctggctgagaaggggttgaacaaccagccaggaccagcaagcaaggcagaacaaaactgataattttcatttattgatctcacatatttatccaagattagagtatcgcggtatcgttttgttttgcagcactatttttattacattcactcaaaacatattacgtcttgtttcatctttgttgatgatgttttatcatgcctgcaaagattaaataatcagcatttacccgccgtatcctggagttgttccgtgtcagatcagattatcgcccgcgtctcgcaatcccttgccaaagaacagtcactggaaagtctggtccgacagcttctggagatgctggaaatggtcactgatatggaatcaacctacctgaccaaagtggatgtcgaagcgcgcctgcagcatattatgtttgcccgtaacagccagaaaatgtacatcccggagaattttaccgtctcgtgggattactcgttatgcaaacgcgccattgatgaaaactgctttttcagcgatgaagtccccgaccgttggggtgactgtattgcggcacgcaatcttggcatcaccacatttctgagcacgccaattcacttaccggatggatcattctatggcacgctttgcgccgccagcagtgagaagcgccagtggagtgaacgcgcggaacaggttttacagttattcgccggactgattgcacaatatattcaaaaagaggcactggttgaacagctgcgcgaagccaatgctgcgctgattgcgcaatcgtataccgactcgttaaccgggctaccgaatcggcgggcgatttttgaaaatctgacgacactgttttccctcgcccggcatcttaaccataagataatgatcgcgtttatcgatctggataacttcaaattaatcaatgatcgttttggtcataatagtggcgatctgtttctcattcaggttggcgagcgccttaatacgctccagcaaaatggcgaagttattggtcgtctcggcggtgatgagtttttagttgtttcactaaacaacgagaatgcggatatttcgtcgctgcgagaacgcattcagcagcaaatacgtggagaatatcacttaggtgatgttgatttgtattatcccggtgccagtcttggcatagtagaagtcgatcctgaaacaaccgatgcagacagtgccctgcatgctgccgatattgcgatgtatcaggagaaaaaacacaaacagaaaacaccttttgtcgcgcatccagcgctacattcctgaggcgtattcacatccttttgattggtgataacatgcgaatcggtattatttttccggttgtaatcttcattacagcggtcgtatttttagcatggttttttattggcggctatgctgccccgggagcataaagatgaaaaaaacaacgattattatgatgggtgtggcgattattgtcgtactcggcactgagctgggatggtggtaacgtcacctctaaaaaatagcaaaggctgcctgtgtgcagcctttgtgcaatttaagcgttaacttttaatcttcctgtagataaatagcacgacaatcgcaccaataacggcaaccacgaagctgccaaaattgaagccatcgactttaccaaagccaaacagcgtgctgatccatccgccgactacggcaccgactatccccagcaggatagtcataaagaatccacctccatctttacctggcatgatccacttcgccagaataccggcaataagcccaaaaataatccatgacagaatgcccattgtttcctcacttatctgttttgcattagcgggttagtcgctgataaaaagcatagcacaacatcgggagggcaagatttgtgacgagcatcacggaggttttttttgcgatggcgcagaaattgcgccatcaacgatcagtgataattaccaaccacaaacatcatgttcgttttccgtgtcataagaacgtacggtattcaccagatcttttatcacttcagccgccacttctggcaccagcaaagtcatcggcgtctctgtttcataatcgacagaaacgccattgctgttattggtgacggtcacggtatacgttgctttgcccatgattcatttcccgttatgaatgactttccgttgttgcgcaccttccatcaggacttcaggagccacgaagaagtcaatgttgaaataagtatcgtcagtcatggcttcaatgttgtgccacttttctggagggaacaccgcaaactgccccgcttcgataaggatcacctgatcaggctctgcactgtgttcatcagcgtagccgagatatttgaccgccccatgcataacggaaaggcgtgggtaaacccccgggcgcgttcctttatcaagatgacgttcgaatattccggcaggtgcagtttgtttattccagaaaggcgttgagcgcgtatgaatataattctgtgggatttgaagcatccttttccctccttcggtgaatgcgctgaaaacggtttattccagccgtttcagggtacgcctgataatttgcattttaaataccatttattggttactttttagcaccatatcagcgaagaatcagggaggattatagatgggaagcccgcgacaacgcgggctgaaagcatcaggattgcagcgtcgccagtcgggcagcgaaacccacgaacatcaaaccaatcagtgagttgccaactttagccagtttctttttggtacgtatgtactgcgtgacaaaagcaccagatataatcaggaagctcaaatagcagaaactcaccagttccagcgtcgccgccagaataaagaatgaaattcccgtatgtggggcattaacatcgataaactgtacgaaaaacgacacatagaacaaaatggctttcggattagtcaggctcaaaattaacgcgcgtttaaaaatagcaccgtattggggctcatcggatttggcctcgctatttttacccttcagggtcgcgtaaagaattttactccccagatagagcaaataaaacgcaccaagataacgtacaatgttgaataatatcggggtggtcttaattaatgtcgccactccagcccatgccagaaacatcaataccgcatcgccaataaatacaccgcaggccgcaagataaccgcctttcataccgctactgacgctatttttgagtacaaacagggtatttggccctggcaccaacacaataaaaatggccccaaccagataggtccagtaattcagaaccccgtattcagcgaacacattaacctctttaattatctttcgatcatgcgcgattaaaggtgaatatgctaaccaatctgtagcggcttagaaaggagaaaatcaggttttaacctgatatcaacccgataattgaatcattaatcaggcatgctccagtgaaaaattcgggtagtgctcggcaaaatactggcgtaaaaattctaccgttatccgcactttcgctgacgtcgccagccttgaaacataaacggcccagacgttcgctggctggtaatattccggtagcacttgcactaaatgaccactggcaatgttttcgctaacatcccaccaggaacgcagagcaatcccctgcccatcgagacaccactgatggacaatttctccatgattagacgacagtgggccggtgactttaatcgcatgggggccttctttattgcgtaattgccagacaccaaaaggatgatcgcgctctttaatgaccaggcacggcaatgcagaaagatcggttaaatgtttcggcgcgccatgttgcgcaataaattccggcgacgcgcagagaatacggtaattggtcgccagtttgcgggcgattaaattaggggcgatgtcatcgccaatgcgaatatcgagatcgacaccttcattgaccaaatcgaccagtcggtcttccacatcaaaacgtaattccagttgcggatacgccttcgccagcgctaataacgccggagccaccacctgtcgtccaaaaccaaagctgctgataatacgcagcatcccctgcggcacctgacgcacgtcagaaagttcgtccatcatctgaccgacatcctgcaaaatccgctgcgcccattcataaatccgctctccttcttcggtaatggtgacgcggcgggtggtgcggtgtaacaacaccacgtttagcgtttgctccagcaaggcgatgcgcttgctgacgaacgccggtgaaacgcccagttcttccgccacggcggcaaaaccagcccggcgagccaccagcataaagacgcgcaaatcattcagcagcggtaaattattcatgattcgtgttttatgtttcaccagttacggggattaattccttttcagtcaattataggatggtgatgttgtcaattttgatggtcaggaagtgagaacccaatgatgaaaacgatgcgtattgctgcgatcccgggagacgggattggcaaagaagtccttcctgaagggattcgcgtgttacaggctgccgctgagcgctggggcttcgccttgagttttgagcaaatggagtgggcgagctgcgagtattacagccatcacggtaaaatgatgccggacgactggcatgagcaacttagccgtttcgacgccatctattttggtgccgtcggctggccggataccgttccggaccatatttcgttgtggggttcgctgctgaaatttcgtcgtgaattcgaccagtacgtcaacctgcgcccggttcgtctctttcctggcgttccctgcccgctggcgggaaaacagcctggcgacatcgatttttacgtggtcagggaaaacaccgaaggcgaatattcctcgctcggcggtagagtgaatgaaggtacagagcatgaagtcgtcattcaggaatcggtatttacccgccgtggtgtcgatcgcattttgcgttatgccttcgaacttgcgcaaagccgtccacgtaagacactaacttctgccactaaatcgaacggtttagccatcagcatgccgtactgggatgagcgagtggaagcaatggccgagaattacccggagatccgctgggacaagcagcatattgatattctctgcgcgcgttttgtgatgcagccggaacgattcgatgtggtggtggcgtccaatttgtttggcgatatcctttccgatcttggcccggcctgcaccggcaccattggcattgccccatccgccaacctgaatccggaacgcactttcccgtcgctcttcgagcctgtccacggttccgcgccggatatctacgggaaaaatattgctaaccctatcgccacgatttgggccggggcaatgatgctcgattttctcggcaatggcgatgagcgtttccagcaagcgcataacggtattctggcagcaattgaagaagtgattgctcacgggccgaaaacacctgatatgaaaggcaatgccaccacgccacaggttgccgacgcgatttgcaaaattattttgcgttaaggtcaaaccagtttatttgaaccgcgtcactgacgcggtttttttattcgttctttgcagtaaataacctgcgtcatttcaccttttattgtttccgtttcgtgttttatggctttccgtattcttaattgtttaatttatgtaacatgcaaattttgttacgcgtacgttaggttccgccgtacaggtattggttttgctggcaatgggactggtgatttatttagccaccagtaaatacggcaatattcgtcttggcgaaggaaaaccggaatacagcacgctctcctggctgtttatgtttatttgtgccggtttaggttcttctacgctttattggggggttgctgaatgggcctattattatcaaacacctggattaaatatcgcaccgcgttcacaacaggcactcgaatttagcgttccctactctttcttccactggggcatcagcgcctgggcaacttatacgctggcctcattaatcatggcttatcactttcatgtgcggaaaaacaaaggtctgagcctttccggcattattgctgctattaccggcgttcgcccgcaaggcccatggggaaaactggtcgatttgatgttcctgatcgccactgtcggcgcactgaccatttcccttgttgttaccgcagcaacctttacccgtgggctttccgcgctgaccggtttacccgataacttcaccgtgcaggcatttgtgatcctgctttccggcggcattttttgcctaagctcgtggattggtatcaacaacggtttgcaacgtctgagcaaaatggttggctggggcgcgttcctgctgccattactggtgctgattgtcggcccaaccgaatttattaccaacagcatcatcaatgccatcggcctgaccacgcaaaacttcctgcaaatgagcttattcaccgatccgcttggcgatggttcatttacccgcaactggaccgttttctactggctgtggtggatctcatacacccctggcgtagcaatgtttgtcacccgcgtttcccgcggtcgtaagattaaagaagttatctggggactgatcctcggcagcaccgtcggttgctggttcttctttggcgtaatggaaagctatgccattcatcagtttatcaatggcgtaatcaacgtcccacaggtgctggaaacactgggcggcgaaacagctgtacagcaagttctgatgtcgttgccagccggtaaattgttcctcgccgcatacctgggcgtgatgattattttccttgcctcgcatatggatgcagtggcctacaccatggcggcgaccagtacgcgtaatctccaggaaggtgacgatcctgaccgtgggctgcgtcttttctggtgcgtggtgatcactctgatcccgctttccatcttgtttaccggtgcttcgctggaaacgatgaaaaccaccgtcgtgctcacagcccttcccttcctcgtcattttactggtgaaagtcggcgggtttattcgctggctgaaacaggattacgccgacattccggctcatcaagttgaacattatctcccgcagacaccggttgaagccctggaaaaaacgccagtgctccctgcgggaaccgtattcaaaggcgacaactgagcgccatcatcctaacgataaaggtatccctatgagcaatctgagccctgactttgtactacccgaaaatttttgcgctaacccgcaagaggcgtggaccattcctgcccgtttttataccgatcagaacgcgtttgaacacgaaaaagagaacgtcttcgccaaaagctggatttgcgtcgctcacagcagcgaactggcgaatgccaatgattatgtgacgcgtgagatcattggcgaaagcatcgtgctggtacgcggtcgtgataaggttttgcgcgcgttctataacgtgtgtccgcaccgtggtcatcagttgttgagcggtgaaggaaaagcaaaaaatgtgattacctgcccgtatcacgcatgggcattcaaactcgatggcaacctggcccatgcacgtaactgcgaaaacgtcgccaatttcgatagcgacaaagcgcaactggttccggtgcgtctggaagaatatgccggattcgtcttcatcaacatggaccccaacgccaccagcgtagaagatcaattacccggcctgggcgcgaaagtgctggaagcctgcccggaagtccacgatctgaaactggcggcccgctttaccacccgcacgcctgccaactggaagaacattgtcgataactatctcgagtgctatcactgtggtccggcgcatccaggtttctccgactccgtacaggttgatcgttactggcacaccatgcacggtaactggacgctgcaatacggtttcgccaaaccgtccgaacagtcgtttaaatttgaagagggtacggatgcggcattccacggtttctggctgtggccgtgcacgatgctgaacgtcaccccgatcaaagggatgatgacggtcatttatgaattcccggtggattctgaaactaccctgcaaaactacgatatttacttcaccaatgaagagttaaccgacgagcaaaaatcgctgattgagtggtatcgcgatgtgttccgtccggaagatttacgtctggttgaaagcgtacagaaagggctgaaatcgcgtggctatcgtggtcaggggcgcatcatggccgacagtagcggtagtggcatttccgaacatggtatcgcccatttccataatctgctggcgcaggtgtttaaggactaatgacatcggcggcggtattttccgccgctgggctgatttttgatggagtacagcaatgtcagactatcaaatgtttgaagtacaggtgagccaggttgaaccccttaccgaacaggtgaaacgcttcacgctggtggcaaccgatggcaaaccattacctgcgtttaccggaggaagtcacgtcattgtgcagatgagcgatggtgataaccagtacagcaatgcgtattcactactgagttcgccgcatgacacctcttgttatcagattgccgttcggctggaggaaaactcgcgcggcggttcccgctttttgcatcagcaggtaaaagtgggcgatcggttaacgatttcaacgcctaataacctgtttgcgctaattccctcagccagaaagcatctgtttatcgcgggcggtattggtatcacccctttcctgtcgcacatggcagagctgcaacacagcgacgtcgactggcagctacattactgctcgcgaaatccagaaagttgcgcatttcgtgatgagctagtccagcatccgcaggctgagaaagtccatttgcatcattcatcaaccggaacacgactggaattagcgcgattattggcggatatcgaacctggcacacacgtttatacctgtggccccgaggcgctaattgaagcggtaagaagtgaagctgcgcgtctggacatcgccgccgatacgctgcactttgagcaatttgctatcgaagacaaaaccggcgatgcatttaccctggtgcttgcccgttccggaaaagagtttgtggtgccggaagagatgactattttgcaggttattgaaaataataaagccgcgaaagtggaatgtttatgtcgtgaaggggtatgcggaacctgcgaaacagcaatactggaaggtgaagctgaccatcgggatcaatattttagcgatgaagagcgtgccagccagcaaagtatgttgatctgttgttcgcgtgcgaagggtaaacgcctggtgttggatttgtagtttgccgaagccggatgtggcgctgagcgcgcccagtccggcttcggaagattttactgcggatattcctgcaataaattgtgtaatgcttccgccatcagctcaccacgccagccggaaatcagctccggcaaattgttctgcggtttcagtttccagtgccagttcagcagttggttgatttgccgacgcgatgccagcaattcggcgctgatcttatgcgtttcgctcacgtcagtaatcagcgacttaatcgctttaaacgctttacgataacccggcatgtccatcaggttaagcatcggctgcggtaaggcatcttccggcaatgtctgcgctttttccaccagcgctagcagcgttttaccgtgaaagcggatttcgctaccggataaacccaggctgtccagttcgcctaaacttcccggcatataacgcgctaccgaccacaaatgctcttcacgcacgacaaagttcaccgccagatcgcgctctcgcgccttgcgcagtcgccagtcggctaacagttgcagacaggccagttggcgtgtgcgtaattgccaggcattggtgatatcacgccaggcatcttccggcgcaacgacttcctgacgacgcatttgcatcaggcggcattcatccagcgccgcaggtagccagccggaggcctccgtttctaccataagcttggcggtgatcggtaacagataccagacatccgccgctgcgtattcacactgacgttcggtcagcggtctggccagccagtcggtgcgcgattcactcttgtccagcgtaacgccggaatactcttccaccatggaagcgaaaccccatgacatcgggcgtccgcagaaggcagcaaggatttgcgtgtcaatcaagggttgtggtaattcgccaaagacattgaggaacacttccagatcttcactgcctgcatggagaaattttgtgatggacggatcgcgcaggatcgctttcagcggtgaccagtcggtgatcccgagtggatcgattagcgccagatgctcgccatcgaaaagttgaatcaaccccagctgcgggtaataagtgcgcgtacgaacaaattcagtatccagggctatcgccggaaaggcacggacggcttcacacaaagaagccagcgcatcgtccgtggtaatcatttggtaattcaaattgttttctctttagtgggcgtcaaaaaaaacgccggattaaccggcgtctgacgactgacttaacgctcaggctttattgtccactttgccgcgcgcttcgtcacgtaattctcgtcgcaaaatttttccgacgttagatttcggtaactcatcacgaaactccaccagcttcggtactttgtatcccgtgagctgacggcggcaaaaagtcaccagtgactcttcggtaagcgatggatcttttttcactacgaagattttcaccgcttcaccactggagccggaaggtacgccaacagccgcgacttcctgtacgccaggatgctgcatgacgacatcttcaatctcgttgggatagacgttaaaaccggaaaccagaatcatgtcttttttacgatcgacaatgcgcaggaatccttcttcatccattaccgcgatgtcgccggtgtgtaaccagccatttttgatgatttcatcggtagcatcgggacgctgccagtaacccagcatcacctgcggtcctttgacacaaagctcacccggttgacctggtggtacttcattatcatcatcatccaccagtttggcttccgtcgacggcaccggcaaaccgatgctaccactatgataatcaatatcatatgggttaacgctgaccagcggcgcacactcggtaaggccatagccttccagcagatactgtccggtcagtttcacccaacgctctgccaccacttgctgcactggcatcccaccgcctgcggaaagatgcagactggagaaatccagctgctggaactctttattgttcagcaacgcattgaacaaggtgttaacgcccgtgatagcggtaaacggatatttcgctaactcttttaccaaccctggaatatcgcgcgggttagtgataagcaggttctgcccacccagttcgataaacagcaggcagttaatggtcagggcaaaaatgtgatacagcggcagcgccgtcaccaccagctctttgcccggatgcaacagcggaccataggtcgcgttaacctgttccaggttcgccagcatattgcggtgagtcagcatcgcgcctttcgccacaccagtggtgccgccggtgtattgcagaaaagctaaatcttccggcaccagttcgggtttgacgtactgcatccggtagccgttatgcagtgcgctacgaaatgaaatggcatctggcagatggtatttcggcaccaaacgcttgatgtatttaacaacgaaattgactaccgtgccttttgccgtagatagctgatcgcccatacgggtcagaattacgtgctgaacggcggttttatcaaccactttttccagtgtgtgagcaaagttagacacgataacaatcgccgatgcgccgctatcgttaagctgatgctcaagctcacgcggggtatacaacgggttaacgtttacgacgatcatcccggcacgcaaaatgccaaacagcgccaccggatattgcaataaattaggcatcatcaacgcaacgcgatcgcctttcttcagccccaacccttgttgcaaataagcggcaaacgcgcgactgcgttcttccagcttgcggaaggtcattacctcccccatattcacaaacgcaggttgatcggcgtagcgcgcgaccgactgctcaaacatatctaccagagattgataacggtcagggttgatctccgtcggaacgtccgcgggataacggttaagccaaaccttcttcaattcttcacctctaaaatgcgtgttcgtcgtcatcgcaaccccaaatgatatacatgccgttaacataatattaactcatcataccagcttgataattacccaacgaaaaggttgcgaagcgcgtcactatttatttttatctttaccgtaagaatgcagaaacagcggaccagccgctgtttctttttctttaaaaacaagcaattattcagttacaactgtttgtactctcgcggggccgggattataccagccccatccgccgtagccatagggccagccacgaccgccataaaaccatggatcaatcggctgaggcggcataatcacctgctgggttaaatgccaacgtttgtaacccgttacttgcatcaccataaatttatagggcgtattgccgattttgccgtcaaccgcaccagtgattggcccgactaccgtaaccagttgtccacggaaatccaccgggtccagaaaaccgttcacatcggcataaatgcgaccgcgagaaggttctcccagcgtcggtctggctccgctgtccagcggtacggtagcaatttccaggcgagttttcccttgctggttttgtaccgcaaccactttgccaccaaagcgtgcctcctgaccaacgtacagctgcggcgcactcatcacccgaactaaatcttgttgcggcgtgggactgctgcctttaatggcgtccggcacagtgacacaaccgctcagcattagcgcaaacgtacctgccagtatgcctttgataacattcttttgaaccgccatggtgcgactcctttttttctcagggcatactcttaagattcattctttgcccggaagtttcttccatgcgacgttgttacgtaaataaaccggttcggcatgttccaccgccaccgttttaccctcagcaaacatctgacacgcaatcggcagcatatcttcagcagcaggcagtaacacttcgccatcgcgcaaaaccagcccgctctctttaccgagatccggccaagcttgccagcccgtccctaccgtcacccattcgccggaaagctgttgcattcgttcatggacgatttcgggtttgagtacggcttcggtttcttcaccgtgccagataccgttttcatcacgctgatattcggcccagtaaacttcgcccattcgcgcgtcaatggctgccagcacgcgggttgcgccgtttttgcgccacgccccttgcgccatcgtcattagcgtggagacgccaatcatcggtaattccgcgccaagcgccagcccttgcgcgatgccaataccaatgcgcacgccagtaaagctaccggggccgcgcccgtaagccagagcgttaatatcagtcagggaagttccgctggtggtcaggatatcctgcaccatcggtaagattcgttgagtatgttcacgagggcaaagctcaaaatgagcgttgacagtaccgtcgttccacagggcgacagagcaggcctctgtcgcggtatcgatagccagaattcgcatgggtcttcgtgcttagatcaataaaaaggcgcgcatcataccatactccgtaacaaattacctggaggatggtatcgcaaggaaacgaaccgcacgggcaatgtcacgggtgcgtggcgcgggcggcagactggcgagaaacgtcgcgccgtaaggacgcatcaccagccgattgtcacaaatcaccagcacgccacgatcgtcggcgtcgcgaatcagtcgccctaccccctgtttgagagtaatgacggcatctggtagttgcacttcatcgaacgggtcgccaccgcgcaaacgacaatcttccatgcgcgcttttaacagtggatcatccggcgaggtaaacggcaatttgtcgataattaccaatgacaatgtatcgccacgcacgtccaccccttcccagaaactgctggttgccacaagaagcgcattaccggcgctgacaaattgctgcaacagttgccctttgctggtttccccctgcaacaatacaggaagcgtcatggtagcgcggaactgctcggccagatcgcgcatcatggcgtgcgaggtacaaagcataaaacaacgaccgttgttagcttcgatgatcggtcgcagcattgccgctaactggcgagcagaacctggctggttggtttgcggcagattgcgcagcacacagagtaacgcctggcggctgtaatcaaatgggctgggcaacagcaacgactcggcctgttcgatgccaagccgcgaggtgaaatgatgcagatcgtcgttcaccgacagcgttgctgaggtgaagatccagctaccgggtttttgcgccattaactctttgaatttatccgccacgctgagcggcgtgagagccagagtaaaatggcgcgaagtgcattcgtaccagtagctgtagcccggctgattgatctcttttagccgcttcagccgtgtgcgatacaacgtggcgcgctcaaatgccgcatccagcaaggcggaacgccccagtgacagtttcgccacgtcataacaaagttccagggtgtcatcgagcagtaaaaatgcccgctgaatttgcggattagctaacagctcacgcaggttaccgcgataacctggctcaccgagttgcagacgaaaatcctgcgcactctgggcaagacgatcagcgcacttttgtaactgctgggtgtcttttaattcggtgcggtaggcgatggtgatgtcttttgccaggtcgagcagttgtcgactggagagtgactgaccaaaatactggctggcaatgtccggtagctggtgggcttcgtcgaagatcatgacgtccgcttccgggatcagttcgccaaatccactctctttaaccaccatatccgccagaaagagatgatggtttaccaccaccacatcggcgtccatcgcttttttacgtgctttgaccacaaagcaatctttatacatcgggcagtcgctgccaagacagttgtcgttggtgctggtgaccagcggccacgcctgtgaatcttccgccacgctgacgcaggtgctgatatcaccatcgactgtttgattagaccaggagcgcagcaggatcacatcgcttaagatttgtaccggcagatcgccccccgccagcgcctgctgttcgagacgttcgaggcagaggtagtttgagcgccctttcagcagcgccacgttgcccgtatatttcaatgcctttgagactgttggcaaatcgcggctgtagagctgatcctgcaacgcttttgagccggtcgagataatgactttctttttcgcccgcagcgcaggagccaggtaagcgtaggttttgcccgtaccggttcctgcttccaccaccagcggctggcctttttctatcgcctgggtgacggctaccgccatctgtcgctgtggttctcgcggcttaaagcctggtatcgctttcgccagctgaccgtctggtgcaaaatcgtccgtcacactaccccctgttgatttgaacagggattatgtcaggatgagggcgctttcgccagttgaagtggtgacggcgacctcacattgtggcagtctttgcagcacgaaaatggaagtataatgaggacaaaatgatgactatcgttcgtatcgatgctgaagcccgctggtctgatgtagtaatccacaacaacacgctctactacactggtgtaccggaaaacctcgacgccgatgcctttgagcaaaccgccaacacgctggcacagattgacgccgtgctggaaaaacagggcagcaataaatcgagcattctggatgccaccattttcctggccgataaaaacgacttcgcggcgatgaataaagcgtgggatgcttgggttgtcgcgggtcatgcgccggtgcgctgcacggtacaagcgggtttgatgaacccgaagtataaagttgaaattaagattgtggctgcggtgtaagctttatcgaagcaaaataagtcagacgataatttatcgataatactggtcggttttacataaatcgaccagagaataagatattactgttgatgcttctgctaattcattatttatatttataatttcaattttatctataaaactaactatataaataaacataaacatgccgttgtgttcgccctttgattagcaactctggttttctttcttagctgaacaatctggttatagcgtgcggactgaccgttaaatttctccatcttactggataacacaccatgagctgctacctttaaaacacctgaatgtcaacaggttaactcgtgccatatcgttataatccctttgatattagatgcaaattaaggtcatatatagccttatcgataacatggttaattttaaggataagaatatgcctgctgtaatagataaagccctggatttcattggtgccatggatgtatcagcgccaacaccaagttcgatgaatgaaagcacggcgaagggaatctttaaatatttaaaagaactgggagtacccgcgagtgccgctgatattacggcgcgagctgaccaggaaggctggaaccctgggttcacggaaaaaatggttggatgggcaaaaaaaatggagacaggtgaacgttctgtgattaaaaatcctgaatacttttcaacatatatgcaggaagaactaaaagcactggtctgagttaaatttatatcagcataaatgggtcaggacgcttttaatcacatataaaaagcgtcctttttctcacaatcaaatgatcatcggcttctataacgaaatcgatacggattagtgtgttactcgtcttcatcctcaaaacgcgccacgattcgctcgccggagtggttggcacgcagctcttctgccaccagcgcgattgcctggccgctgctcatcccttgtgccatcagttcctggatccgctcgacagctttttgctgctgttcatgggtgagtgaaggtaaacctgcaaacattgttaactcctgctaaattgttggcgctaattatttcatgctacccggcacatagccagtagagtcaggactgatgaagacgttatctcccgctgtgattactttactctggcgtcaggacgccgctgaattttatttctcccgcttaagccacctgccgtgggcgatgcttttacactccggctatgccgatcatccgtatagccgctttgatattgtggtcgccgagccgatttgcactttaaccactttcggtaaagaaaccgttgttagtgaaagcgaaaaacgcacaacgaccactgatgacccgctacaggtgctccagcaggtgctggatcgcgcagacattcgcccaacgcataacgaagatttgccatttcagggcggcgcactggggttgtttggctacgatctgggccgccgttttgagtcactgccagaaattgcggaacaagatatcgttctgccggatatggcagtgggtatctacgattgggcgctcattgtcgaccaccagcgtcatacagtttctttgctgagtcataatgatgtcaatgcccgtcgggcctggctggaaagccagcaattctcgccgcaggaagatttcacgctcacttccgactggcaatccaatatgacccgcgagcagtacggcgaaaaatttcgccaggtacaggaatatctgcacagcggtgattgctatcaggtgaatctcgcccaacgttttcatgcgacctattctggcgatgaatggcaggcattccttcagcttaatcaggccaaccgcgcgccatttagcgcttttttacgtcttgaacagggtgcaattttaagcctttcgccagagcggtttattctttgtgataatagtgaaatccagacccgcccgattaaaggcacgctaccacgcctgcccgatcctcaggaagatagcaaacaagcagtaaaactggcgaactcagcgaaagatcgtgccgaaaatctgatgattgtcgatttaatgcgtaatgatatcggtcgtgttgccgtagcaggttcggtaaaagtaccagagctgttcgtggtggaacccttccctgccgtgcatcatctggtcagcaccataacggcgcaactaccagaacagttacacgccagcgatctgctgcgcgcagcttttcctggtggctcaataaccggggctccgaaagtacgggctatggaaattatcgacgaactggaaccgcagcgacgcaatgcctggtgcggcagcattggctatttgagcttttgcggcaacatggataccagtattactatccgcacgctgactgccattaacggacaaattttctgctctgcgggcggtggaattgtcgccgatagccaggaagaagcggaatatcaggaaacttttgataaagttaatcgtatcctgaagcaactggagaagtaagacgtggaataccgtagcctgacgcttgatgattttttatcgcgctttcaacttttgcgcccgcaaattaaccgggaaaccctaaatcatcgtcaggctgctgtgttaatccccatcgtccgtcgaccgcaaccggggttgttgctgactcagcgttcgattcatctgcgtaaacacgctggacaagtggcattccctggaggtgcagtcgatgacacggacgcatcagctatcgccgccgcgctgcgcgaagctgaagaagaggtcgctataccgccttccgccgttgaagttatcggcgtgctgccgcccgtcgatagcgtcactggctaccaggtaaccccagtggtcggcattatcccgcccgatctgccgtatcgcgccagtgaagatgaagtctcggcggtgtttgaaatgccgctcgcccaggcattacatctgggtcgttatcaccctttagatatctaccgccgtggtgattcacatcgggtatggctgtcctggtacgaacagtattttgtatggggaatgaccgcaggcataattcgtgagctggcgctgcaaattggtgtgaaaccctgactatacttatctttacatctacaaaacactacttgagacaatcatcgcaatattagttaaatcgcggtttttgattagtttaattcatgtgaatagttaagccagtcgccgcgttccctcttacactatgcgctgttattagttcgttactggaagtccagtcaccttgtcaggagtattatcgtgattagtctattcgacatgtttaaggtggggattggtccctcatcttcccataccgtagggcctatgaaggcaggtaaacagttcgtcgatgatctggtcgaaaaaggcttactggatagcgttactcgcgttgccgtggacgtttatggttcactgtcgctgacgggtaaaggccaccacaccgatatcgccattattatgggtcttgcaggtaacgaacctgccaccgtggatatcgacagtattcccggttttattcgcgacgtagaagagcgcgaacgtctgctgctggcacagggacggcatgaagtggatttcccgcgcgacaacgggatgcgttttcataacggcaacctgccgctgcatgaaaacggtatgcaaatccacgcctataacggcgatgaagtcgtctacagcaaaacttattattccatcggcggcggttttatcgtcgatgaagaacactttggtcaggatgctgccaacgaagtaagcgtgccgtatccgttcaaatctgccaccgaactgctcgcgtactgtaatgaaaccggctattcgctgtctggtctcgctatgcagaacgaactggcgctgcacagcaagaaagagatcgacgagtatttcgcgcatgtctggcaaaccatgcaggcatgtatcgatcgcgggatgaacaccgaaggtgtactgccaggcccgctgcgcgtgccacgtcgtgcgtctgccctgcgccggatgctggtttccagcgataaactgtctaacgatccgatgaatgtcattgactgggtaaacatgtttgcgctggcagttaacgaagaaaacgccgccggtggtcgtgtggtaactgcgccaaccaacggtgcctgcggtatcgttccggcagtgctggcttactatgaccactttattgaatcggtcagcccggacatctatacccgttactttatggcagcgggcgcgattggtgcattgtataaaatgaacgcctctatttccggtgcggaagttggttgccagggcgaagtgggtgttgcctgttcaatggctgctgcgggtcttgcagaactgctgggcggtagcccggaacaggtttgcgtggcggcggaaattggcatggaacacaaccttggtttaacctgcgacccggttgcagggcaggttcaggtgccgtgcattgagcgtaatgccattgcctctgtgaaggcgattaacgccgcgcggatggctctgcgccgcaccagtgcaccgcgcgtctcgctggataaggtcatcgaaacgatgtacgaaaccggtaaggacatgaacgccaaataccgcgaaacctcacgcggtggtctggcaatcaaagtccagtgtgactaatacttcttactcgcccatctgcaacggatgggcgaatttatacccgctttctcgtctgctgtaatattccccactacacttccactgttgcgtcaggcgtttgtcgccatacgcttacagggtggcccgcatgcaaaaagcacaacggatcattaaaacctatcgtcgtaatcgaatgattgtttgtacgatttgcgcactcgttacgctcgcttcgaccctgagcgtgcgatttatttcacagcgtaacttaaatcaacaacgggtagtacaattcgccaatcacgctgtagaggaattagataaagtactgcttcccctacaggcaggtagcgaagtcttgcttccgctgattggtctgccctgctctgtcgcccatttgccattacgtaaacaggcggcaaaactccaaactgtgcgatccattggcctggtgcaagacggcacactttattgctccagcatttttggttatcgcaatgtgcccgtcgtggacattctggctgaacttcctgcaccgcaaccacttttacgcctgacgatcgaccgtgccctgattaaaggcagtccggttttgattcaatggacgcctgcagcgggcagtagcaatgctggggtcatggagatgattaacatcgacttactgacggcaatgctgcttgagccacaactgccgcaaatcagtagcgccagcctgacggtggacaaacggcatttgctctatggtaatgggctggtagattcccttccgcaacctgaagacaatgaaaactatcaggtttcttcgcaacgctttccttttaccattaacgttaatggtccgggggctacggcgctggcatggcactatcttccaacacaattaccgctggcggtgctgctaagtttactggtgggctacatcgcctggctggcgaccgcttaccgaatgagcttttcccgcgaaatcaatctgggcctggcgcaacatgagttcgaattgttctgtcagcctttgcttaatgcgcgcagccagcaatgtattggtgtagagattttgctgcgctggaacaatccgcgtcagggctggatttcaccggatgtgtttattcctatcgcggaagaacatcatttaattgtgccactgacccgctatgtgatggcagaaaccattcgtcagcgccatgttttcccgatgagtagtcagtttcatgttggcattaacgtcgcacccagccattttcgccgtggtgtgctgataaaagatctcaatcagtactggtttagcgctcacccgattcagcaactgatcctcgaaatcaccgaacgcgatgccttactggatgttgattatcggattgcccgcgagctgcatcgtaaaaacgtcaaactggcgattgatgacttcggcaccggcaacagctcgttttcctggcttgaaacattacgtcctgacgtgctgaaaattgataagtcatttaccgcagctataggttctgacgcggttaactcgacggtgaccgatatcatcatcgcgctggggcaaagactgaatattgaactggtggcggagggcgtggaaacgcaagaacaggcgaagtatttgcgccgtcatggcgtgcatattttgcaagggtatttgtacgcacagccgatgccgctacgtgattttcccaaatggctggcgggcagccaaccgccgcccgcccggcataatggacatatcacgcccattatgccgttacgttaacgcttactcatcttcatcgtgcgccggttgctctttaacaatgcgaaccagatcaacacgataatcattggcttcaatgatggtgatatgcagtggccctacatcaatcacatcgcccacacggggaatgtgaccatttgccgagatcacgaggcccgcgaccgtcgcgatatcatcgtcatcggcaaggtgctcaacatcaagcgcctgctgcaaggcatgcaaatctgtaccgccttttaccagccagccgtcaccatcagtaatgatttccggcgtttcgtcagcgtccgggaattcacccgcaatggcttccagcacatccagcggcgtgaccagaccttgtaccacaccaaactcgttggtcacgataacaaagctcccgcgagcacgacgcagcacgcccaacaggttgatcggatcgagggtttccgggacgataatcgccggagacgccgaagcaatcgccgccacatcaacgccctcttccagcgccaccagcagttctttagcacgtacaataccgatgatttcatccagttcaccgcgacataccgggaacagactgtgcggtgaagagagcagttgctcgcggatttcatcgaccccgagattagcgtcaacccagcttatttcaccgcgcggcgtcatgatcccgcgcagagaacgcgacgccagcgtcagtacgccgttaatcatgtaacgttcttcttcggcaaatgcaccttccgggatcggcatcggcatcgggttatcggcatcgtgctgaacattggcctgacgtttcccgcccatcaaacgcaggatggcatcggcagtacgcgctcgcagcggcaaagtcgactggtggcgaataaagttgcgacgcgcaatctggttaaacacttcgatgatgatcgagaagccaatcgcggcatacaggtaacctttcggaatgtggaaaccgaaaccttctgccaccagactcagaccaatcattaacaggaagctcagacagagcaccaccaccgtggggtgctggttaacgaatcgcgtcagcggtttggatgccagcaacataaccgccatcgcaatcactaccgccgccatcatcaccggcagatggttaaccatccctactgcagtaattaccgcatccaacgagaagacggcgtcaaggatgacaatctgtgtgacgaccacccagaaactggcgtagcctttaccgtggccggaatcatgatcgcggttttccagccgttcatgcagttcggttgttgctttgaacagcaagaatatccccccgaacaacataatcaggtcgcgtccggagaaggagaaatccatgacggtaaatagcggtttggtcagcgtgaccatccatgaaatcagcgacagcagccccagacgcataatcagcgccagtgataaccccagcaaacgcgctttatcgcgttgttttggcggcagtttgtcagcaagaatggcgatgaagaccaggttatcgatacccagcacaatttcgagaacaacaagcgtgagtagccccgcccaaattgaggggtccattaagaattccatgacaagctcctgcttaaggaatagctattcgacgccagaaataatgcaggcgtaacgacaaaatgcaaacgaaaggtgcggcatagagtgccagaaaggcaggcgttaaaaggcctgatgctgaaatgacgtcggtgacgatccatactgcgggctactgccctatactccatggttgttaaacgggagttaaacatatcagagacgcctctgatttggcaaagatttaccttcctttgcaaacgaatgtgacaaggatattttacctttcgaaatttctgctaatcgaaagttaaattacggatcttcatcacataaaataattttttcgatatctaaaataaatcgcgaaacgcaggggtttttggttgtagcccttatctgaatcgattcgattgtggacgacgattcaaaaatacatctggcacgttgaggtgttaacgataataaaggaggtagcaagtgaccattgctattgttataggcacacatggttgggctgcagagcagttgcttaaaacggcagaaatgctgttaggcgagcaggaaaacgtcggctggatcgatttcgttccaggtgaaaatgccgaaacgctgattgaaaagtacaacgctcagttggcaaaactcgacaccactaaaggcgtgctgtttctcgttgatacatggggaggcagcccgttcaatgctgccagccgcattgtcgtcgacaaagagcattatgaagtcattgcaggcgttaacattccaatgctcgtggaaacgttaatggcccgtgatgatgacccaagctttgatgaactggtggcactggcagtagaaacaggccgtgaaggcgtgaaagcactgaaagccaaaccggttgaaaaagccgcgccagcacccgctgccgcagcaccaaaagcggctccaactccggcaaaaccaatggggccaaacgactacatggttattggccttgcgcgtatcgacgaccgtctgattcacggtcaggtcgccacccgctggaccaaagaaaccaatgtctcccgtattattgttgttagtgatgaagtggctgcggataccgttcgtaagacactgctcacccaggttgcacctccgggcgtaacagcacacgtagttgatgttgccaaaatgattcgcgtctacaacaacccgaaatatgctggcgaacgcgtaatgctgttatttaccaacccaacagatgtagagcgtctcgttgaaggcggcgtgaaaatcacctctgttaacgtcggtggtatggcattccgtcagggtaaaacccaggtgaataacgcggtttcggttgatgaaaaagatatcgaggcgttcaagaaactgaatgcgcgcggtattgagctggaagtccgtaaggtttccaccgatccgaaactgaaaatgatggatctgatcagcaaaatcgataagtaacgtattgtgttgattatcactcagttttcacacttaagtcttacgtaaacaggagaagtacaatggagattaccactcttcaaattgtgctggtatttatcgtagcctgtatcgcaggtatgggatcaatcctcgatgaatttcagtttcaccgtccgctaatcgcgtgtaccctggtgggtatcgttcttggggatatgaaaaccggtattattatcggtggtacgctggaaatgatcgcgctgggctggatgaacatcggtgctgcagttgcgcctgacgccgctctggcttctatcatttctaccattctggttatcgcaggtcatcagagcattggtgcaggtatcgcactggcaatccctctggccgctgcgggccaggtactgaccatcatcgttcgtactattaccgttgctttccagcacgctgcggataaggctgctgataacggcaacctgacagcgatttcctggatccacgtttcttctctgttcctgcaagcaatgcgtgtggctattccggccgtcatcgttgcgctgtctgttggtaccagcgaagtacagaacatgctgaatgcgattccggaagtggtgaccaatggtctgaatatcgccggtggcatgatcgtggtggttggttatgcgatggttatcaacatgatgcgtgctggctacctgatgccgttcttctacctcggcttcgtaaccgcagcattcaccaactttaacctggttgctctgggtgtgattggtactgttatggcagtgctctacatccaacttagcccgaaatacaaccgcgtagccggtgcgcctgctcaggcagctggtaacaacgatctcgataacgaactggactaacaggtgagcgaaatggttgatacaactcaaactaccaccgagaaaaaactcactcaaagtgatattcgtggcgtcttcctgcgttctaacctcttccagggttcatggaacttcgaacgtatgcaggcactgggtttctgcttctctatggtaccggcaattcgtcgcctctaccctgagaacaacgaagctcgtaaacaagctattcgccgtcacctggagttctttaacacccagccgttcgtggctgcgccgattctcggcgtaaccctggcgctggaagaacagcgtgctaatggcgcagagatcgacgacggtgctatcaacggtatcaaagtcggtttgatggggccactggctggtgtaggcgacccgatcttctggggaaccgtacgtccggtatttgcagcactgggtgccggtatcgcgatgagcggcagcctgttaggtccgctgctgttcttcatcctgtttaacctggtgcgtctggcaacccgttactacggcgtagcgtatggttactccaaaggtatcgatatcgttaaagatatgggtggtggcttcctgcaaaaactgacggaaggggcgtctatcctcggcctgtttgtcatgggggcattggttaacaagtggacacatgtcaacatcccgctggttgtctctcgcattactgaccagacgggcaaagaacacgttactactgtccagactattctggaccagttaatgccaggcctggtaccactgctgctgacctttgcttgtatgtggctactgcgcaaaaaagttaacccgctgtggatcatcgttggcttcttcgtcatcggtatcgctggttacgcttgcggcctgctgggactgtaagactgttgtacactaccggggccttttggccccgtttttttatctggaggattaatgacaatcacggacctggtactgattcttttcatcgccgcactcctggccttcgcgatctacgatcagttcatcatgccccgccgtaacggccccaccctgctggcaattcctttgctccggcgtggtcgcatcgatagcgttatcttcgtcggattgattgtcattcttatctataacaacgtcacgaatcatggtgcgttaataacgacatggttattaagcgcactggctctgatgggtttttatatattctggatccgcgttccgaagatcatctttaaacaaaaaggttttttcttcgccaatgtctggattgaatatagccgaatcaaagcgatgaacttgtcggaagatggcgtgttggtgatgcaattagaacagcgtcggctgttaatccgcgttcgaaatatcgacgatctggaaaaaatttataagcttctcgtttcaactcaataagttatgaatttagccaaagctatgtttagtgtatttttaataatcagacatagcttaggctatattacctcttcccttatttgttatttattttaacgtttcattgatatataaatccaaatgaaaatcgttatcaataaagcaatgaaataatatattccaacagttgttttatattctcaaaatatgttaaggttgcgccctcatttggggagtagccgatttccagattccggaaatgtacgtgtcaacatactcgttgcaaaacgtggcacgtacggactgaatactttcagtcaggcgagaccatatgcacatcaatcgctatgcctgcatgaacgcgaaaaccatcacggcttgttgttcatgtatgcatgtttgctgggggcgatgatgtgttttatggataccccggtcaggacattgtcatgaatatcactgctactgttcttcttgcgtttggtatgtcgatggatgcatttgctgcatcaatcggtaaaggtgccaccctccataaaccgaaattttctgaagcattgcgaaccggccttatttttggtgccgtcgaaaccctgacgccgctgatcggctggggaatgggcatgttagccagccggtttgtccttgaatggaaccactggattgcgtttgtgctgctgatattcctcggcgggcgaatgattattgagggttttcgtggcgcagatgatgaagatgaagagccgcgccgtcgacacggtttctggctactggtaaccaccgcgattgccaccagcctggatgccatggctgtgggtgttggtcttgctttcctgcaggtcaacattatcgcgaccgcattggccattggttgtgcaaccttgattatgtcaacattagggatgatggttggtcgctttatcggctcaattattgggaaaaaagcggaaattctcggcgggctggtgctgatcggcatcggcgtccagatcctctggacgcacttccacggttaataagaacgctgccagaggtgaatattaaagtccgtctggcagtcgaacacttcttttgctgccagtgtttgccagacttctggcttcgcacgccaggcaaacggcgtcatctgcaataatgcgacggcttcatcaccgcgaagacgcatcggataacacaactccgcactctgctgtaatgtaaaaccttccagttgttctgcatgaggtgcatgaagatgtacttcattgtaaatcagccccttcagctccatcaaatgtcgcggtcccggcgtggcagtaatgacccagccgccgggcttcactactcgtgctaattcttctgctttacacggcgcgtaaatacgtattatggcgtccatactggtatcggaaaacggcaaacggtggctggaagcgacacaaaaagtgacctgcggatagcgtttcgccgccgcttttatcgctaccttcgaaacatccagaccaaacgtggtgatttcgggcaacgcatcggcaaatgcgtgtgtgtaatacccttcaccacagccaatatccagcaccgccgtggccttatcatcaagccgttccctcagttgggcgacaattgcatcacgcagcggctgataatgtccggcatctaagaatgcgcggcgtgcttgcatcatttccgcgctgtcgcccggatcacgagaccgtttatgctgaacgggcagcagattgacatacccttctttcgccatatcaaactgatgtcgctggggacagatatagctgtttttttcacgcgaaagaggctgatggcaaagtggacaggaaaaagacatgacaactccggcaggatactaaaggccgcaagtgtaacgcgaatcacgcggcgggcaaatatccgaacgccaggagcgaagataaagcatagtaaaaagcctcgcattcgacgaggctttatagcgagattgaagcgtattcacacttcagatcagtggattcgatcagatagctgttacgttaacagctgccggacctttctggccgtcctgaatttcgaactcaacgttctgaccttcagccagagttttgaagccattaccctggatagcggagaagtgtacgaacacatctttgctgccatcagccggagtaatgaagccaaaacctttagactcgttgaaccacttaacctgacctttaatctttgccatttgaaaaattccttagattgttttcttcgcccgcaggcataacatagataaaactgacacattactgcatgaggcaccaatataaggctcggcagagaagcggtattcaacgtcaacgtgtttactcaggacttctttactgaaaatgccacacataaacagaactgtacctcgtttaacccgaaatctgttatcacatacaacgttaattatggcaagccatttttaaacatgtctcgatcagacgcacaaatctcgatacgtcttccactttttttgcacacttatgcaacggaatacgcgccgatatatcattgtgcttaaccttgccagttcaggcagatacttaaactggcgtattttctaacatagttcaataagttcagttgttccaggccagtgggagaagttattacatagtgcgtgcaatatcacattttttgctatgcaatgaataaaaagttatatcactttttctcataaaacagtcagttaacggctattaattaccctaaagagaagtcaatccccaaagggattgtaaatttaaaataagaaaaattgatgaatgagcaaaaaaatcaagagagaaacgtttcgctaataaataataccacgcttaatcacaaatccgatgtaaacatcctaataaattaatggggtaaatatctttttctgatatcccgttacgcaaataaataatatgataattatttgaagtcagaccagagttttaatttgaagcagttgcaccatgacagtgcgtataatcaggatgaattgagtaacccttcaacgacggggttactcaagattgaggaaggattatcgttcggcgaccagacgaataatatcttcgtcttcaaccgatttttgactctcaacggtctttttatctgctttctctggttcgtttgcttcgcacaaacgacgtaacagtgcattttgacgtttttgctgatccagcaacgcctcaagcagttcaatctgttcgttagtccgtgaactggcacgattgataaaaaaccacaagatgagcccgataagaagaaccaccaccgatacaaccaaagacgcaatgttcatcacgcctgaatttacaacttcgttcatttcaccacctctgagtagaggcgctattctaccactgctggagaggaagaaaatctagtgctgaaaaaatgatatcaccacgggataaactggttaatggcacaaattccgctgaaaaattgtacatcctgatcgcacatcatgttgaatacctgcgcccaaagcagcaagcaagccaacaccacgacaaccagaacgacccatcgaaactttttcactccaatctccgtttcacctaccttatgtcattaaactagcatgcgttagttaaacagcgcctaactatgtcgatattcgtgctttttcggaatgagtcgcttgcttcagcgcatattgccgctacgattaagcgaacataaaaagagaagaggttgtaatgcgattcatcattcgcacagttatgctgatagcactggtatggataggattattactcagcggatatggcgttttgattggaagcaaagagaatgccgcaggattaggtttgcaatgtacctatctgactgccagaggcaccagcacggtacaatacttgcacactaaaagtggttttttggggataacagattgcccgctgttacgcaaaagcaatatcgtggtcgataatggttaagggcaataaataaccagattctcactcctgagtaaaatactcttatagcaagcgcgtttaatataacgccaccttcaactttatttttctcatgctaaataaagaacctgtctgtttgatattccgacaggttcttactctcatcagaacggatagtcgtgataacccatttgggcagaaattttgcgcgctgcggtatgcaacattgcgacatattcctgtaaacgctcttcagagaaacgcaacgtcgggaaggagatgctcaaaccggcaatgaccacgccaaagcgatcaaataccggtaccgcaatgcatcgcagcccttcttcctgctcttcattatcttcgccatacccctgctcgcgcacctggtccagaacgggtaataacgcttctgtactggtgatggtccgctcggtactgcgtttatactccacgccctcaagaatttgcttcacttcatcgcgatcgcgccatgccagcagtaccttaccaatcgcggtgctgtacagcggattacgacgcccaatccgtgaatacatgcgcaaattgtacatagagtcaattttgtgaatgtaaacaatactgtcttcgtccagtgcgccgaggtggatagtttctttggtcaggcgggagagctcacgcatctggatatctgcgctacgaattaaatcgacgttttgtaacgcgcgagcgcccagttcaaacaatttcagggtcagggaatatttctccgactccccttcctgcgccacataacctaaggttttcatggtctgtaaaaagcgataaacggtgctttttgacatcatgacgcgctgcgacagctcggttatccctatttcgcgctcttcacccagcgcctgcaaaatgccaaaaacttttagcacggaagatacagaatcaggctgtttatccagatctgcgttagccatttatcacctcattgcgagtgttttataaaaatcagaactgttttttattataatttcgcaccagggtggtcgcaatccatcttttgccggttagttacaattctgcgacatccaccgtgaatatcagtgctagaatcatacccctgttgattattcaccaaagatataaaattcctatgccaaaagttcaggccgacggcaattaataataacagcgatacggtgcgatattaaccattgtgattggtatttcgatggccgtccttgacggcgcaatcgccaacgtcgccctgccaacaatcgccacggaccttcatgccacgccagccagttccatctgggtagtgaacgcctatcaaatcgccattgtcatctccctgctctcgttttcgtttctgggcgatatgtttggctatcgacgtatttataaatgcggtctggtcgtttttctgttgtcttcactgttctgcgccctttctgattcgctgcaaatgctcacccttgcgcgtgtcatacaaggtttcggcggtgcagcgttgatgagcgttaataccgcacttatccgcctgatctatccacaacgttttctgggtagagggatgggcataaactcgtttattgttgccgtctcttctgctgccgggccgacaattgctgcagcaatcctctccatcgcatcctggaaatggttatttttaatcaacgtaccgttaggtattatcgccctgcttctggcgatgcgttttctgccacccaatggttctcgcgccagtaaaccccgtttcgacctgcccagcgccgtgatgaacgcgttaaccttcggcctgcttatcactgcgttgagtggtttcgctcaggggcaatcgctgacgttaattgctgcggaactggtggtaatggttgttgttggtattttctttattcgccgccagctttctcttcccgtaccgctgctaccggtggatttactgcgtatcccgctgttttcactttctatttgcacatctgtttgctctttctgcgcacaaatgctggcaatggtttccctgcccttttacctgcaaaccgtgctcgggcgtagtgaagtcgaaacaggtttacttctgacaccgtggccgttagcaacgatggtgatggctccgctggcaggctatttgattgaacgcgtacatgcaggattgctgggggctttagggttgttcatcatggctgcggggcttttttccctggttctgctgcccgcgtcacctgcggatatcaatattatctggccgatgatcttatgtggtgctggatttggcttattccagtcacccaataaccacaccattattacctccgcgcctcgcgaacgtagcggtggagccagtggcatgttaggaacggctcgtctactgggtcagagtagcggcgcggcgctggtggcgctgatgctaaatcagtttggagataatggtacacacgtctcgctgatggctgcggctattctggcagtgattgctgcctgtgtcagtggtttacgtatcactcagccacgatccagggcataaaaaaagcgcgtcgatcaggacgcgctttttagtatttacttcatattacttcaggtattcacccgtacgcagagcttcaattcgtttatccagcggcgggtgggtcatgaacaactcactgagcgatttcgacttaccgttaatgcagagagccatcatgctggttgcttcttgcggttcatagctggttttcaggcgctgcagcgcggcaatcattttctcgcgaccaaccagttttgccgaaccggcatcagcatggaattcacgatgacgcgagaaccacatggtgataatgctcgccagaataccaaacaccagttccagaaccgttgcaaccgcaaagtagatcagcgggttgccgttgctctcttcaccttcatcacgatttccgcccataaaacccgcggcaagctgcgccagaatacgggaaataaagataacgaaggtgttcaccacgccctgaatcagcgtcatggtgaccatatcaccattggcgatgtggctgatttcgtgagcaattaccgcctcggcttcatccgggctcatgttctgcagcaaaccggtgctgacagcaaccagagaggcatcacggcgcgcaccggttgcaaaagcgttgatgtccggcgcatggtagatagccacttgcggcatagcgatccccgcctgacgagcctgggttgctacagtattgaccagccaacgttccctttcgttacgcggttgctcgatcacttccccgccaacagatcgtaatgccatccatttggacatcagaagcgaaacgaaggaaccaccaaaaccgaacagcaaggccatgatcatcagcccctgaacgctgctcgactgtatccctgtcaggctcagtaccagcccgaaaacgaccattacggccaggttcgttagcaggaagagcgcgattcgcatcataattttctttttacctcagtttaacaaaacgcaatatgcgatacccacatcgtatgggttacgcgactattttcaagtctggatagtgcgtaagtcaccagaaagacacaactttacattttgtagcatctgatttacggcatcttgtcgctgttaaaaaatcaggcacaatttcttgtgcctgattgatattacttgacgggagcgggttgttccgcgggtctggctttttcaagcttcgccagatcgagtgcgatattcaccgtctcatccagataaggatccggctcctggtaatctttcggtagatcatccagtttcttcaactccggtttaccttcgcgtttaaagcgttcgttcaaacgcgccagacgcgtcgcatcatcttcattattctctttctcacgcacagcgtaattcagagaaacgatattgcgcttgtccttcatagcgttgaagcgcgcgatatccttcatgatgttctggaactcaggatctttcgcgatacgcgcattatgttccttcagcagctccggttcaaaggccgttaaatctcctgatttcacataagtcgcggcatcaatgctatcccacggcagcgcgttatcttcgaatttctcacccgtttccgtttcttcattacccgtcggcatgatgatgtctggcgttacgcctttacgttgcgtactgccgccgttaacgcgatagaatttctggatcgtgtactgcacagaacccagcgctggccattcaggacgtaacatctgatcgtaaatacggttcaatgaacggtattgctgaacggtgcctttaccaaacgtcggttcacccacaaccagcgcacgaccgtaatcctgcattgccgcggcaaagatttctgaagccgaagcactgaagcggtcaaccagcaccaccagcgggcctttatagaaaacctgtccgtcggtatcgctatcttcacgaaccttgccgttgttatcgcggacctgaacaatgggacccgcaggaataaacagaccggagagcgatacggcttcagttaacgccccaccgccattgctacgcaggtcgatgatgacgctgctgacattctgtttttccagtttctgcagttgcactttgacatcgtctgtcaaacccacatagaagcccggaatatccagcacgccgactttctctttaccgacggtcttcaccgacattttaaccgcgcggtcttcgagacgaatacgttcacgggtcaacgttacagtacgggtcttggtccctttaccagcaggtaaaatttccagacgaactttactgcccttcggccctttaattaaggcaaccacatcatcaagacgccagccaatcacgtcaaccatcggcttgcctgtttgaccaacaccgacaattttgtcaccaacgctgatagctttactcttcgctgccggaccacctgccaccatcgaattgataacggtgtagtcatcatccatttgcagcactgcgccaataccttccagcgacaaactcatttcagtgttgaactgttcggtattacgcggggaaagatagttggtatgcgggtcgatttcacgcgcaaacgccgtcattgccagcgagaaaacatcttcgctgttggtttgcgccagacgacgaatggcaaatttgtagcggcgagtcagggtttcacgaatttctttatccgtttttcctgtcagcttcaggcttaactcgtcgaatttgactttactgtcccacagcgcgttcaactcagcctcgtttttcggccagggcgctttgctgcggtcaaggttataagtgtcgttgccggtgaaatccatcggcttttccagtaccgacaaagcgtactggtaacgctcaaaacggcgcttttgcgccagattgtagagatcgtagaaaacgtcgagtttgcctgaacgcagttcatcgcctaactcggttttctttttcgcgaactgttcaacatcgcttgccagcagcacgttgtggctgtaatcgagcagattcaggtagcggtcaaagattttggccgaaaatgcctgatcgaggtcgaactggcgataatgagaacgggtgaagcgcgacgttacgcgctcacttaccgtcgcatgctgcgtctcttcctttaataccggaatttgatcagcacgcgtgatatcttctacagcgaaggtctggcctgctattgcaagcaggccagctaacgcggtaagcctaaaaaacatgttcatgcctggcccggcctccgtttcagaacaccaggtgttctgcgcgcacaatcaaagacatacccgaattcagctggacgcggacgccgtctttggtgatttctaatacggtggcatccatcgcgttttgacccgctttcaccttcagggcttgtccgacagtcagagctgaaatgtcagaaaccggggtgtgctgttcttcgcgaggtgcttttactgtttttggcgctttctctaccggcttttgcgcacgaggtttacgttcagcgccttctttgcggcgtggcgtagtcggacgtggcttgcgttcgcggcgcggtgcgtcttctttctcaccagcagttgcggcagcttcgcgttttttcgcttgctgttcagcacgctgtgcctgaacacgcgctttcgcttcttcaagctgcttgcgagcatgctctacatgttgctcgtccagctcaccgcatgggttgccgtcaagatcgacacgcgttgcgccgggtttaacaccgtaaagataacgccagctcgaagtgtagagacgtaaagcggatcgcaattgcgttttgctcaggttcatttccccagcaacacgatcgaccaaatcctgaaaaataccgattttcagcggacgcgcttcaccttccgcactgaaacagtggggaaaacgttcggccagaaacgcgattacttctttactgctattcaacttaggttgattttccatgaaatttcctgattacaacggacgtagccaacaagcgcaggcatgaacaggcgtcattataatgacgctatcagtaaatgctacgttatccgttgattatcctgcgacgctcgcaaagaattttttgtaatccgtcgttgcaagcactttttcaagctgtgccacaagctgacgtaagccttgctcgtcctcgtctgtaaagcgaccgaagacggtactatcgatgtcgagaacaccaataatctgatttttcaccaccagcggcagaacaatttcagaattactcgccgcatcacaggcaatatgcccgtcaaacacatgaacatcctcgatacgctgcacttgattgcgggcaaccgcagtgccgcacacgccgcgcccgacgggtatccggacacaggcaattttgccctgaaatggtccgagtaccagtgtatcgtcctcaagcaaataaaaacctgcccagtttatgtcagtgagacgctcatataacaacgcactggtgttcgcaagcgttgccagaaaactggtttctcccgccatcagcgcgttaaagtcgcgatttaaatccgcgtaaaattctgttttgttcattatataatcacttggttgtcttacctggatctgccagcctattaaaataagcattaaatgcgttaatgctcaagatcattcccatcatgggttaagattaatgttaattcttattacatttggcacgtcatggctcttaacacaccacaaattacgccgacaaaaaagataacagtgagggcaatcggcgaggaactgccgcgtggtgattaccaacgttgcccgcaatgtgacatgctgtttagcctgcccgagataaattctcatcaaagtgcctattgtccgcgctgtcaggcaaaaattcgtgacgggcgcgactggtcgctaacgcgcctggcggcaatggccttcaccatgctgttgcttatgccgtttgcctggggcgaaccgctgttgcatatctggctgttaggcattcgtattgacgccaacgttatgcaaggcatctggcaaatgaccaaacagggcgatgcgataacggggtcgatggtctttttctgcgttattggtgccccgctcattctggtgacctccatagcttatttatggtttggtaaccgactgggaatgaatttacgtccggtactgctgatgcttgagcgacttaaagagtgggtaatgctcgatatctacctggtcggcattggcgttgcttctataaaggtacaggattatgcccatatccaggctggtgtcggcttgttctcttttgtggcgttggtgattttaacgacggtgacgttgtcacatcttaatgtcgaagaactgtgggagcgattttatccgcagcgccccgctacgcgtagggacgagaaacttcgtgtctgtcttgggtgccattttaccggctatccagatcagcgtggtcgctgcccgcgttgccatatcccgctacgcctgcgtcgccgtcatagtctgcaaaaatgctgggcggcgctgttagcgtcaatcgttttattgttacctgccaacctgttgcctatttctatcatttatctgaacggaggacggcaggaagatacaattctttccggaattatgtcgctggcaagtagcaacattgcggttgcaggaatcgtgtttatcgccagtattctggtaccgtttactaaagtgatcgtcatgttcactttactgttgagcattcattttaaatgccagcaaggtttacgcacacgcattctgttactgcggatggtgacctggattggtcgctggtcgatgctcgacctgtttgtcatatctttaaccatgtcgctgattaatcgcgatcagatcctcgcttttactatgggaccggctgcgttttatttcggcgcagcggtaattttgactattcttgctgtggaatggctggacagccgcttactttgggatgcacatgagtcaggaaacgcccgcttcgacgactgaagcgcagattaaaaataaacgccgtatctcacctttctggctgctgccgttcatcgcgctaatgattgccagttggctgatttgggacagttatcaggaccggggtaataccgtcaccatcgactttatgtcggcggatggtattgttccaggccgtacgcctgttcgttatcagggcgttgaagtcggaacagtgcaggatatcagcctcagcgacgatcttcgtaagattgaagtcaaggtcagcatcaagtccgatatgaaagatgcgctgcgcgaagagactcagttctggctggtgacgccaaaagcatcgttggcaggtgtctccgggctggacgccctcgtcggtgggaactatatcggcatgatgccgggtaaaggtaaagagcaggatcactttgtcgcactcgatacccaaccgaaatatcggctggacaatggcgatctgatgatccacctgcaagcccccgatctcggttcgctgaacagcggttcattggtctatttccgcaagatcccggtgggaaaagtctacgactatgccatcaatcccaacaagcaaggcgtggtgattgatgtcctgatcgagcggcgttttaccgatctggtgaaaaaaggtagccgtttctggaacgtttccggcgttgatgccaacgtcagtatcagtggcgcgaaggtgaaactggaaagcctggcggcactggttaacggtgcgattgccttcgattcaccagaagagtcgaaacctgccgaggcggaagatacctttggtctgtatgaagatctggcccacagccagcgtggcgtaataataaaactggaactgccgagtggggccggattaaccgccgactcgacgccgttaatgtatcaggggctggaagtcggacagctgactaaactggatttaaatcctggtggtaaagtcacaggggaaatgaccgttgatcccagcgtcgttaccctgcttcgtgaaaatacccgcatcgaattacgcaacccgaaattatcccttagcgatgctaatctcagcgccctgctgaccggcaaaaccttcgagctggtgcccggcgatggcgagccacgcaaagagttcgttgttgtgccaggcgaaaaagcactgctgcatgaacctgatgttctgacgctgaccctgaccgcgccggaaagttacggtattgatgcgggtcagccgctcattcttcacggcgtgcaggtaggccaggttatcgatcgtaaactcaccagcaaaggcgtcacctttaccgtcgccatcgagcctcagcatcgcgaactggtaaaaggcgatagcaaatttgtcgtcaacagccgtgtcgatgtgaaggtggggctggatggcgttgagtttctcggtgccagcgcctcagaatggatcaatggcgggatacgtattctgccgggcgataaaggtgagatgaaagccagctatccactgtatgccaatttggaaaaagcgctggagaacagccttagcgatttacccaccacaaccgtgagtttgagtgcagagacgctgccggatgtgcaggcaggatcggtagtgctgtaccgtaaatttgaagttggtgaagtgattaccgtgcgtccgcgagctaacgcgtttgatatcgatctgcatattaagccggagtatcgcaaccttctgaccagcaatagcgtgttctgggcagaaggcggggcgaaagttcagctgaatggtagtggtctgaccgtacaggcatccccgctctccagagcattaaagggagccattagcttcgacaacctcagcggtgccagcgccagtcagcgtaaaggcgataagcgtattctgtatgcttccgaaacagcggcccgtgcggttggcgggcagattacgcttcacgctttcgatgccggaaaactggcggtcgggatgccaattcgctatctcggtattgatatcgggcaaatccagacgctggatctgattaccgcacgcaatgaagtacaggcaaaggcggtactttacccggaatatgtccagacctttgctcgcggtggtacgcgcttctcagtggtcacaccgcaaatttcggcagctggcgttgagcatcttgatactatcctccagccgtatatcaacgtcgaaccaggccggggcaatcctcgccgcgactttgaattacaagaggccaccattactgattcgcgttacctggatggcttaagcattattgttgaagcgccggaagccggttcgttaggcatcggtacgcctgtgctgttccgtggtctggaagtcggtacggttacaggaatgacgctggggacattgtcagatcgcgtgatgattgcgatgcgcatcagtaaacgctatcaacacctggtgcgtaacaattccgtcttctggttggcatcgggttacagtctggactttggtctgacgggcggcgtagtgaaaaccggcacctttaaccagtttatccgtggcggcatcgccttcgccacgcctccgggtacgccactggcaccgaaagcccaggaaggcaaacacttcctgttgcaggaaagtgaaccgaaagagtggcgtgaatggggaactgcgcttcccaaataatgcccactgctccggcgtgcctgcgccggagcgtttatgctaaactgcgcgcctgtttttttgccagtggtacatgctcgtggcccaacacaccgtttatttcccggacgcctttctgacacaaatgcgcgaagcgatgccttcgacgctctcatttgatgattttcttgccgcctgtcagcgcccgttgcgccgcagcattcgcgttaatacgctgaaaatctccgttgctgatttcctgcaattaaccgctccttatggctggacgcttacgccaattccgtggtgtgaagaaggtttctggattgaacgcgacaatgaagatgcattgccattgggtagtaccgccgagcatttaagtggcctgttttatattcaggaagccagttcaatgttgcctgttgccgccttgtttgctgacggtaatgcaccacagcgggtgatggatgtcgctgccgcgcctggctccaaaacgacgcaaatttccgcgcggatgaataacgaaggggcaatccttgccaatgagttttccgccagtcgggtaaaagtgttacatgccaatatcagccgctgtggtatcagtaatgttgcgctcacacattttgatggccgcgtgtttggtgcggcagtgccagaaatgttcgatgccattttgctggacgctccctgctctggcgaaggcgtggtgcgtaaagatcccgatgcgctaaaaaactggtcaccagaaagcaatcaggaaatcgcagctacacaacgggagcttatcgacagcgcctttcatgcattacgtcctggtggtacgctggtttactcgacctgtaccttaaaccaggaagaaaacgaagccgtttgcctgtggctgaaagagacttaccccgacgcagtagagtttttaccacttggcgatctcttccctggtgcaaacaaagcgctgaccgaagaaggctttttgcatgttttcccacaaatttacgactgcgaaggcttcttcgttgctcgtctgcgtaaaactcaggcgattcccgccttacccgcccccaaatacaaagtcggtaattttccgttcagcccggtgaaagatcgcgaagctggacaaattcgtcaggcggctacaggtgttggcttaaactgggatgaaaacctgcgcctctggcagcgtgacaaagaactgtggttgttcccggtgggcattgaagccctgatcggtaaagtccgattttctcggttggggattaaacttgccgagacgcacaacaaaggttatcgctggcagcatgaagcggttattgctcttgcctcacccgataatatgaatgcattcgagctgacaccgcaggaagcggaggagtggtatcgcgggcgcgatgtttacccgcaagccgcgccagtggcggatgatgtattggttactttccagcatcaaccgattggtttagccaaacggattggttcgcgattgaaaaacagctatccgcgtgaactggtgcgcgatgggaaactttttaccggtaacgcctgacagcgcacaaaaaaagcgcactttttgactggcacattcggctgcctcaactaggctgaaaaatggtgcgatcggactggtcgtaccacaatcggcagctaaatggagagcacgaagatgaaaaccagtgtgcgcataggcgcttttgaaatcgacgacggcgaattacacggtgaatcgccaggtgatcgaacgttaaccattccttgtaaatctgaccccgatttatgtatgcaactggatgcctgggatgctgaaaccagtatccctgccctgctaaatggcgaacactctgtcctttaccgtacccgttacgatcaacaatctgatgcctggattatgcgtcttgcctgatccaaaaagaacccgtcggcatggcgggttatttgtcctggttattcccccgttgtaaaatctctcctaaacttaacggtacggcaccacacttcggggatgaaatgttcgcgctggtactttttgtttgctacctggatggcggttgtgaagatattgttgtggatgtctacaacacggaacagcagtgtctttattctatgagcgatcaacggatccgccagggcggttgttttccgattgaggattttatagatggtttctggcgacctgcacaggagtacggtgatttttaattattgcaattgcacaagagtcagttcgcccccaaagacagcaccggtatcaatataatgcaggttgccaatatccacgcgatgtcgcaacggtgtatgaccaaaccagaaatgatcagcacctgtaattccctgccctttttggcgttcacctaatcgcgagcggctccacaagacctgatgcaaatcaacgtccttttgccattcataaacatcatctggataatcggcatgagcaataacatgcttgccggtgcgactgtgtacttcaagaataaagggcaaatgctgacatttttccagcgccgttttcgcttgtttctgttgattatctgccagcgcaataaaccagtcgccgccattcatcaaccacaaagacatctgctgggatgccagcgcatccatcgccatctgttcatgattgcctcttaccgcacaaacccaatgttgttccagtaactgcagacaacgtaaactttgcggcccacgatcgataacgtctcccactgagataagtaaatctcgccacggatcaaaacgacaatgccataatttgcggcgcaactgctcaagacaaccgtgtatatcgccagaaagccagatatgtcgccattgatgacccgcaattctctgataaacgggcgcaggctgtttcatcaatattttcctcccgcgctaaagatcacataatcttaacaagaatgttaaaaaacgctggactcagacagtagagtgtgtgttatggttgactataaagtcagcgaaggaaatgcttctggcttttaacagataaaaagagaccgaacacgattcctgtattcggtccagggaaatggctcttgggagagagccgtgcgctaaaagttggcattaatgcaggcttagttgccttgccctttaagaatagatgacgacgccaggttttccagtttgcgtgcaaaatggtcaataaaaagcgtggtggtcatcagctgaaatgttaaaaaccgcccgttctggtgaaagaactgaggcggtttttttattggaaatcaaaaggctattttaggtaattaacagagtttttcagctcgttctataaacggtgccagactcattttttcgccgggattgttaggatcatcaatctgaatcaccgaaatgggttgggcattggtcttcccactggcaacttccttttgtgcgatatcgtttaaaggatactgcacgagggtactcggattaataacatacaaagcattacccggtcggcaagtcagcatcacctcttcgcgattaaacgcccatttgtctttacccacttcaaaacgactgacggtaatcacctgcggtgcagccagcgccgctgcagaactggtgagtaacagaaacgccagaatactttttttcatcattttcgtaatccatcaaaaaggttcgagagtcgcaagcaggctgatgatcaccagcactaccgcacctatcgcccattcgagtttagtcatccacacaaaccagggtgccgcacgatcttcatcctgcctcatgcgcggtacaagaacataacgattagccagcgcaatgaccaccataatcatcaccaggatggctttgagcaataagagttggccccagtaagtcgtaagcgtggggggaaatccggtaatcaacaatgcattaagcacgccgcttgccagtacgccgatcaccgcaaaatgcccgcaccaggaaaaacgcatcagcgcctgaatagcctggtgtcgccaacggcctttgatgagttgcatacaccagagcaccggcagtaatcccccaaaccacgccgccgcacaaatcaggtgaatcgcgtgattagtctgatggattttcgctgttaccccttcattcagcgtcgcatgccccactcccgccagcagaataaattgcgcggtagtgagcataaacagcaaacgtggcatattccgcggttgcataagggcgacgatcaacgttacgagggcgagaacaatttgccataaccagatgccaccaaactgcgtttgcaaaacagcctgccaaatgtttggcgaaaatacatctgtccatcccgttcccatcaacccgccctgaacggcgagcattgcagtggcactgatcaaactccagacggcagcgtgctgttgtaaacgcagaaaacgcttcgccagcaagcgacgaatcgtcaagggggccagccaggcaccgtacattgcgaagccaaaaaccagcatcagcgaggtgaaatggataaatcgcagcgcgatccaggtaaacgccagcatgatttatttcacgctaaaggtgtagtgtcctttcgttttatgcccgtccaccgaaacaacatgccagtcaacggtgtaggttccgggtttcagcgaatcggccagtggaacaatcagttgcttttggtcctgctcatttcgcttcgccggtaatgttttaatattttcgttttttggccccgtgatttttgcaccactgaatcctgtttcaacaccttccgagaagtttaaagtgattgcctgcggtgcagctgtcacttgcgcgtttgccgcaggatactgatgcgttaaatgcgcatgtgcccagacggaaggtgtcaccaacgaagtggtcaggattgccagcgcgtagcgaagggagcgtgcagttgaagccatattatctattcctttttgtaataacttttttacagagcataaccttgtctaatgtctgagtcgaggatcatcaattccggcttgccatcctggctcactcttagtaacttttgcccgcgaatgatgaggagattaagaatgctgaagaatctggctaaactggatcaaacagaaatggataaagtgaatgtcgatttggcggcggccggggtggcatttaaagaacgctacaatatgccggtgatcgctgaagcggttgaacgtgaacagcctgaacatttgcgcagctggtttcgcgagcggcttattgcccaccgtttggcttcggtcaatctgtcacgtttaccttacgagcccaaacttaaataaaacttatacagagttacactttcttacataacgcctgctaaattatgagtattttctaaaccgcactcataatttgcagtcattttgaaaaggaagtcattatgtcgttctggaaagttgcagcagcgcaatatgagcctcgtaaaacctcactcaccgaacaggtagctcatcatctggagtttgtgagggccgccgccaggcaacaatgtcagctgttagtttttccatcgctttctttactggggtgtgattattcgcgacgtgcccttcctgccccacccgatctctcactgttagacccgctttgttatgccgcaacgacctggcgaatgaccatcattgccggccttcccgttgaatataacgatcgctttattcgtggaattgcggtgttcgcaccgtggcgaaaaacgcctgggatctaccatcagagtcatggtgcatgtctgggccgtcgttccagaaccatcacggtggtcgatgaacaaccgcaaggtatggatatggacccgacctgttcactgtttactacagggcaatgtctgggagaacccgacctgctggcgtcggcccgtcgcttacaatttttttcacatcagtactcgattgccgtgctgatggcaaatgcccgtggtaacagtgcactatgggatgaatatggtcgtctcatcgttcgcgccgatcgtggttcattattgttagtcggtcagcgttcatcacagggttggcaaggcgatatcattccattacgctaggctttttcggcctggagcatgccatgttgcgcattatcgatacagaaacctgcggtttgcagggagggatcgttgagattgcctctgttgatgtcattgacggaaaaatcgtcaaccccatgagccacctggtgcgccccgatcgtcctattagtccacaagcgatggcgattcatcgcatcaccgaagccatggtcgccgataaaccgtggattgaagatgtgatcccacactattacggtagtgaatggtatgtcgcgcataacgccagctttgaccgccgcgtactgcctgagatgcccggtgagtggatttgcactatgaaactggcccgtcgtttgtggcctgggatcaagtacagcaatatggcgttatataaaacacgcaagctcaatgtacagacgccgccgggcctgcatcatcaccgcgcgttgtatgactgttatatcaccgccgcgttgcttatcgatattatgaacacctccggctggacggcagaacagatggccgatatcaccggacgtccgtcgttgatgacgaccttcacctttggcaaataccgtggcaaagcggtttccgacgttgccgaacgcgatccgggctatctgcgctggttatttaataacctggacagcatgagcccggagctgcgtttaacactgaaacattatctggaaaatacttagtccgcaggcgtagcgggtaatgttccctgcgccagcgcgaccagaaaagcatattccatcgctacgccttcgtacgatttaaagcgaccagatttaccgccatggcctgagtccatgtcggtacagagcaataaaagatggtcatcggttttcagctcgcgcaatttagcgacccattttgccggttcccaatattgcacctgagaatcgtgcaaaccggtcgttaccagtaaatgcggataagcctgtgcggtgacgttgtcatacgggctgtagcttttcatgtactcgtaatattgcggatcctgcgggttaccccactcttcaaactcaccagtggtaagaggaattgattcatcaagcatcgttgttacaacatcaacaaacggtacctgggcgataacgccgtggaataattccgggcgttgattaattgcaacgcccatcaacatgccccccgcactcccgcccatcgcataacaaagcgaaggagagccatagcccagttttaacaatgcatcgcaggcatcaagataatcattaaacgtatttttcttcttcagaaattttccgtcttcgtaccattgttgccccagctcaccaccgccgcgaacatggacaatggcgtagacaaagccacgatctaacaaactcaagcggctaaaactgaaatcggcatcaatacttgcgccgtaagaaccatagccatacaccagcaacgggttgtgtcctttgcgaaaatgtttgcgatggtagaccaacgaaaccggaacttcgacgccatcacgggcgactatccacaggtgttcactgcggtaattcgccgcataaaaaccaggaacttccgtttgttttaatacacgacgctcaccggtatccatatccagttcaaacaaagtgtctggtgtagtcatggaagaataaccataacgcaatcgcgcggtttcaggttctggattgtaggcaatccaggtcacataggccggatcatcaaaggcaataccaatgacttcccgggtcttgcggttaatttggcgcaaactggttaacccgcgctgacgctcttcaaccaccagccagtcggtaaacagcgtaaacccttccagcatgatgttttcgcgtggcggaattaactcttcccactgttgctcatcacgcatacgggtacggtataagccaaagtttttgccgtggcggttggaacgcagataaaaacgatgctggtagtgatcaaggctgtattcgtgatctttgcggcgcggcagaaaaacaaacggctcggcatcggccatttccgcgtccagcaggcgaacttcactggtggtggcgctggccaaatgaatgactacatagtgcttcgaggtcgttttatgcaggctgacgtaataggtatcgtctttttcttcgtagatcagtttatcttgcgatgctggcgtaccgatggcgtgacgccagacctgataaggcagcagcgtcaccggatgcttgcgaacatagtagaaaatccaggagtcatttgcccagacaaagctgggttcaacgttatccagcagttccgggtaccagttaccagtttccagattacgaaaacgaatgccgtactggcgtcgggaaagaaaatcttctgccagcgccataatggtgttatcgggcgtaatcgccattccgcccatcgaataaaactcactatgagctgcgcgcttattggcatcgagcaatgtttcccactcatcccactcttcactgaatgccgattgacgctggtagatagcatattcacagcctggttcataaatatgccgatagcggtagccatttttgatgtagggcgcagaaacttctcgttgcggaatgcggtcgatgatttcctttaagatgcgatcctgcaaggcttgttgtgaggccatcacccgatgaccgtaactattttcttgttgcaggtagtccaggacttctggctgagaacgcgtatcgtcccgcagccagtagtaattatcgatgcgcgtatcgccatgaagcgtcatggcgtggggaatgcgggcggcttttggtagcatgttattgttctttctggttgaaacatcttataagggtggcaaaactcaccggggatgcaagcgaaacaggggagtcattgcttagatgatgacaggtaatggcgcggatatcgaatgttatgcagacagagaaaatcagcctgttcaaatggctgtgcgattctggatagcccgaaatagtcaacttcaggctatccagagagcggaattattccgccaaagtgcgtttttgctgttcgagatcgcgttcaatgccgtcacgaacatcctgggggattttcagcgcgtcacccagtgcattcaggtaactgcgttccataaaatggtcaatatcaatagccgcgcaactcaggaaatagatttccagcgcctcttcttcattgcggaccccggtagccaggcgttgtggatccagcggttgttcgattgcctgctcaatgagtacacgcccctgctcttccacgccggctccacgcaattgctggtcgattgccgcacgttctttggcatcaatatgaccatcacttttagcggcaaagaccagcgcaaggatcaaacgtgctgtacgctcatccagcggcgtactttgcgcgccaaactgcggttcgtcctgatgcgccgcgcgaattttatctttgtatttattccacagcaccgtacccgctaccgctccgccgccaaccagtaacgcgttggtgccatatttcgtaagaagtttacgtgctgatttatttgcgaccagcagcccagccagtccgcctaatgcgcctggcactaacagtttgaccaatccctgatccgcagacgaggaggtagaagaactgctttgcccaagcagggattgcagttgatttaaccagttagccatatttgctcctcaataaccatttttagtgcctgtagcatagcggatgaggatgtcagaaaatgtatatcgagacaaaagatgcgcaaataagcggggcggtaggccgttattcaaagaaattcgcgccaggtaaggtatttactgtatatcaggtgataagggtattttaggtgaaagtagtttgtcgttttgagtggcattgtttgatgctgattgcccgatgcgacgctgttgcgtcttctcaggcctacgattgtggtgcgttctggggcggacaaggcactcgcgccgcatccgccaacagtcaatcgaattatcagaagccattaacgccgctgatattccgccattcccgctttgcagtccacgctgacctggtaatgaatatcggcacttttaccacgcacggttagcggtactgaccatttatcatctttaccctgaatgtcctgcaaactgacccaagccacgggatcggcctgaccgacaattttttgatcatctgcccaacgcgccacgcgattttgttgataatcacgttttacgctcgcggcaattccggcagcatccagatcttcacactttgggaaagtgaccgacttgctggtttcattattggcagcgaaaactgatgcgcaggcagaaaccaacaacagccctaaaaacgcccctctttttttcatgtttttctccatagcacaatgattcaggagaaagcatggtacaaattgtcaggagcgcaagttgcttcaggccgcgtgtgaggcatcttcctcttcggattcagcaccgacgacctgtggggacggtaatttgccggttttcagaatggtgctcagcacatctttttgttctgccagccatagcgaaagggcttcacgttgctcgtcttccatttgcactggagaatttgtcagccaggtgtcaagcagatccgccgtatcaagcattttgtcataagcatcggcttcctttttgctggtaaacgacattttctcttcgccctcacgaatgactacgtatttaacttcaaccgccatttgcagcctctcataataactgtgattttatacagtatatttcttttcggttgagaaatcaacatcagcaataaagacacacgcaaacgttttcgtttatactgcgcgcggaattaatcaggggatattcgttatgacgttattaggcactgcgctgcgtccggcagcaactcgcgtgatgttattaggctccggtgaactgggtaaagaagtggcaatcgagtgtcagcgtctcggcgtagaggtgattgccgtcgatcgctatgccgacgcaccagccatgcatgtcgcgcatcgctcccatgtcattaatatgcttgatggtgatgcattacgccgtgtggttgaactggaaaaaccacattatatcgtgccggagatcgaagctattgccaccgatatgctgatccaacttgaagaggaaggactgaatgttgtcccctgcgctcgcgcaacgaaattaacgatgaatcgcgagggtatccgtcgcctggcggcagaagagctgcagctgcccacttccacttatcgttttgccgatagcgaaagccttttccgcgaggcggttgctgacattggctatccctgcattgtaaaaccggtgatgagctcttccggcaaggggcagacgtttattcgttctgcagagcaacttgctcaggcatggaagtacgctcagcaaggcggtcgcgccggagcgggccgcgtaattgttgaaggcgtcgttaagtttgacttcgaaattaccctgctaaccgtcagcgcggtggatggcgtccatttctgtgcaccagtaggtcatcgccaggaagatggcgactaccgtgaatcctggcaaccacagcaaatgagcccgcttgcccttgaacgtgcgcaggagattgcccgtaaagtggtgctggcactgggcggttatgggttgtttggtgtcgagctatttgtctgtggtgatgaggtgattttcagtgaggtctcccctcgtccacatgataccgggatggtgacgttaatttctcaagatctctcagagtttgccctgcatgtacgtgccttcctcggacttccggttggcgggatccgtcagtatggtcctgcagcttctgccgttattctgccacaactgaccagtcagaatgtcacgtttgataatgtgcagaatgccgtaggcgcagatttgcagattcgtttatttggtaagccggaaattgatggcagccgtcgtctgggggtggcactggctactgcagagagtgttgttgacgccattgaacgcgcgaagcacgccgccggacaggtaaaagtacagggttaaacccggcaaaaaaacgctacaaaaatgcccgatcctcgatcgggcattttgacttttacagcttagcgccttctacagcttcacgcgccagcttagtaatgcggtcgtaatcgcccgcttccagcgcatctgccggaaccagccaggaaccaccgatgcacagcacgcttttcagcgccaggtagtcacggtagttagccggagaaataccacccgtcgggcagaaacggacctgggagaacggacccgcgatcgcctgcagggctttcacgccgccgttagcttcagccgggaagaatttgaactctttcaaaccgtagtccatacccagcatcagttcggaaacagtgctgatccccggaatcagaggaatagtcccttcggtagcagctttcagcagcggctcggtcagacccgggctaattgcgaactgtgcacccgcttcagtgacttctgccagctgctgtggattcagcaccgtaccggcacccacaatcgcttcaggcacttctttggcgatagcacggatagcgtcaactgcacactcggtacgcagagtcacttccagaacgcgcaccccaccagcaaccaacgcttttgccatcggcaccgcgtgttccagtttttttaccacgataaccggtacaaccgggccggtggtcaggattgattctgcacttgttttccagtttttcatcagagttttctctcgcctgattacaaatttgtcgtcttaaaaagtgatacaggttgcgccctgttcggcaccggacagtttttcacgcaaggcgctgaataattcacgtcctgttcccacgcgtgacgcgctcaggtcaggaatgtgcggttcgcgagcagccagttccgcttcgtctaccagcagcgtcagttcgcctgtctgtccattcacacgaatgatgtccccgtcgcgcacttttgccagcagcccgccatcgtaggcttctggtgttacgtggatagctgacggcactttacctgaagcgccggagagtcgtccatcggtaactaacgcaattttgaaacaccggtccaataatacaccaagtggcggcatgagtttatgtaattctggcattccgttcgcttttggcccctgatgacggacaacaacgacacaatcgcggtccagcaaacccgcttcaaaggccggcataacgtcatgctggctttcaaaaacaaccgctggcgcttcaatcacctggttctcaaccggcacggcagaggttttcataaccgcacggcccaggttaccgcttaacacttttgtcccaccatgatgagagaaaggttgttcgaaggaagcgatcacattgctgtcgagtgatttttccgccccttcccgccagtccagttcaccattattcagccatggttcaagggtataacgagacagaccaaaacctgccaccgtattgacatcttcatgcagcaggcctgctttgagcagttcacgcaccagaaccggtacgccacctgccgcctggaagtggttaatatcggccggaccgttcgggtagagacgtgccatcagcggtacaacatcagaaaggtcagagaagtcatcccagttaatctgaataccggccgcgcgcgccatcgccaccaggtgcatggtgtggttagtggaaccaccggtcgccagcagtgcaacgataccgttcaccaccactttctcatcgatcatcttaccgatcggcatccattcattaccattaccggtcatgcgtgtaacctgacgcgcagctgcggcggtcaaagcatcgcgcagcggagaatccggatgaacaaaagaagagcctggcaactgcatccccataaactccaccaccatctggttggtgttggcagtaccgtagaaagtacatgttcccggcgcatggtaagacgcggcttctgactccagtaaggccatgcggtccactttaccttcggcataaagctggcgaatacgcactttttctttatttggcaaaccgcttgccatcggtccagacggcacaaacaccgcaggcaaatgaccaaacgacagggctgccatcgtcagacccgggacaatcttgtcgcacacaccgaggaacagagcaccatcaaacatgttatgggacagccccaccgccgcagacatcgctatcacttcgcggcttagcagcgacaattccattccatcctgcccctgggtgacaccatcacacatcgccggaacaccgcccgcaacctgaccaaccgcattcgcttcatgcagggctttacgaatgatttctggatagtgttcataaggctggtgcgcggagagcatgtcgttataggaggtgatgatggcgatattgttacgcaacatgcttttcaaagaggctttgtcttctggctggcaggcagcgaaaccgtgtgccaggttaccgcatgccaactgcgaacgatgaacggtcgaagttttcgcttgttctatccgggcgagataagcagagcgagtctcgcgcgaacgttcaatgattcgatttgttacgcgtaacaattgtggattcataaaggctcctgaaattgagttgtcagagcaggatgattcacaacgcgtttcattcagaggatttatgactgaaacgcctgtaaccggagctcatagggcaaaaacgtttcagtcagtgtaataaaaaaagcctcgtgggtgaatccgcacgaggcctgaaagtgtaaaaattgttctacaatctgcgcaagatcatgttaccggtaaaataaccataaaggataagcgcagatattactcaaactcattccaggaacgaccatcacgggtaatcatcgccaccgaggcaacgggtccccaggttccggcctgatacggtttcggcgcatcattgtccatcgcccacgcctcagtaatggagtctacccatttccaggcttcttccacttcgtcgcgacgtacaaacagtgcctgaataccacgcatggtttccagcagcaaacgttcataggcatccgccagatgcgtctgattaaaggtttctgaatagctcagatccagcttggtgatttgcaggttatgtttgtggtcaaggccaggaactttattcagtacctggatatccacgccttcatcaggttgcagacggatagtcagtttattctgcggcagatcctgccacgattctttaaacagattcagttcaggtgttttgaaatagaccacgacttcagaacatttggtcggcagacgtttaccagtacgcaggtagaatggcacaccggcccagcgccagttatcaatgtcgacgcggatcgccacgaaagtttctgtattgctgctcttgttcgcgccctcttcttccagatatcccggcacttttttgccctgggcgaagcccgcagtatattgcccgcgtacggttttttcgcgtacgttggagcggtcgatgcggcgcagagacttcagtactttcactttttcatcgcggatgctgtctgcgctcaggtcagacggcggagacatcgcaatcatgcaaagaatttgcagcaggtggttctggatcatgtcgcgcatctgaccggctttatcaaaatagccccagcgcccttcgatccccacttcttctgccacggtaatctcaacatgatcaatggtgcgattgtcccagttattcacaaacagggagttagcaaaacgcagcgccaacaggttcagcaccgtttctttaccaagatagtggtcgatacggtaaacctggcactcctcgaagtattcgccaacctgatcattgatttcctgcgaggtcgccagcgacgtccccagcggtttctccatgactacgcgtgccggtttagcattcagttttgcctcgccaagccctttgcaaattgcgccaaaagtgctgggcggcatggcaaagtagttaatggtgatacgatttttttgatccagcatcgcgccgagacggctgaatgcagcagtgtcattgacatcgagattacaaaaatccagacgtgcactcagggtgtcccataaaccttcatcaatggtttctttcatgaaagtttcgagcgcctcgcggacaactttggtatatgccgctttatcccagtcagcacgccctacgccgataatccgggtgtccgggttgagctgaccggctttttccagttgatacagggaaggcagcaatttacgacgcgcaaggtcgcctttcgcgccgaaaatgaccaggtcacaggcctgggctgtttgcgttaccgccatgtcattctccttaagttaactaacccggtacttaagccagggtatacttgtaattttcttacggtgcactgtactgcttttacgagcttgcgaaaactgtaaacgcttatccacccgtgcgattacgggaaaagcgcgcaaagtgcggcaaaactgataaaaaaatcatcgttttccattgggtaaaaatctgacactgatcatgttatgaaaaaaaataacaacttttttatctgcttttgtcattaacacggcacacaggcgtaatatctgacaaaactgcatttcgatttctttcagtgcggaaatcgtcattacccgtgagtctctttacatcatgaatatgctggaaaaaatccagtctcagctggaacatttgagcaaatcagagcgcaaagttgccgaggtcattctggcttcgcccgataacgcgatccattcgagtattgctgctatggcactggaagccaatgttagcgaaccgacggtgaatcgtttctgtcgcagcatggacacgcgcggttttcctgattttaaacttcatctggcacagagtctggcgaatggcactccctatgttaatcgcaatgtcaatgaagatgacagcgttgaatcatacacagggaaaatatttgagtccgcaatggcaacgcttgatcatgtccgtcattcactggataaatctgccatcaaccgcgccgtcgacttgctcactcaggcaaaaaaaatcgcctttttcggattaggctcttcagccgccgttgcccacgatgcgatgaataagttctttcgttttaatgttccggtggtgtactccgatgatatcgtgctgcaacgcatgagttgtatgaattgtagcgacggagacgtggtggtgctgatttctcacactggaagaacaaaaaatctggtcgagctggcgcagctggcacgcgaaaacgacgccatggtgattgccctcacctctgcgggtaccccgctcgcccgggaagcaacgctggcaattaccctcgacgtaccggaagatactgacatttatatgcccatggtttctcgacttgcacagctgaccgtgatagatgtgctggcgacaggatttactttgcgacgcggtgcaaaattcagagataacttgaagcgggtcaaagaagcgctgaaggaatcgcgttttgataagcagttacttaatttaagtgacgatcgctaaaaacgactgtcactgtcctaatcttatacgacatccgaatgagattaatttatcgccatcgcggcgttatttcattcggatttcatgttcaagcaacacctggttgtttcagtcaacggagtattacatgtccagaaggcttcgcagaacaaaaatcgttaccacgttaggcccagcaacagatcgcgataataatcttgaaaaagttatcgcggcgggtgccaacgttgtacgtatgaacttttctcacggctcgcctgaagatcacaaaatgcgcgcggataaagttcgtgagattgccgcaaaactggggcgtcatgtggctattctgggtgacctccaggggcccaaaatccgtgtatccacctttaaagaaggcaaagttttcctcaatattggggataaattcctgctcgacgccaacctgggtaaaggtgaaggcgacaaagaaaaagtcggtatcgactacaaaggcctgcctgctgacgtcgtgcctggtgacatcctgctgctggacgatggtcgcgtccagttaaaagtactggaagttcagggcatgaaagtgttcaccgaagtcaccgtcggtggtcccctctccaacaataaaggtatcaacaaacttggcggcggtttgtcggctgaagcgctgaccgaaaaagacaaagcagacattaagactgcggcgttgattggcgtagattacctggctgtctccttcccacgctgtggcgaagatctgaactatgcccgtcgcctggcacgcgatgcaggatgtgatgcgaaaattgttgccaaggttgaacgtgcggaagccgtttgcagccaggatgcaatggatgacatcatcctcgcctctgacgtggtaatggttgcacgtggcgacctcggtgtggaaattggcgacccggaactggtcggcattcagaaagcgttgatccgtcgtgcgcgtcagctaaaccgagcggtaatcacggcgacccagatgatggagtcaatgattactaacccgatgccgacgcgtgcagaagtcatggacgtagcaaacgccgttctggatggtactgacgctgtgatgctgtctgcagaaactgccgctgggcagtatccgtcagaaaccgttgcagccatggcgcgcgtttgcctgggtgcggaaaaaatcccgagcatcaacgtttctaaacaccgtctggacgttcagttcgacaatgtggaagaagctattgccatgtcagcaatgtacgcagctaaccacctgaaaggcgttacggcgatcatcaccatgaccgaatcgggtcgtaccgcgctgatgacctcccgtatcagctctggtctgccaattttcgccatgtcgcgccatgaacgtacgctgaacctgactgctctctatcgtggcgttacgccggtgcactttgatagcgctaatgacggcgtagcagctgccagcgaagcggttaatctgctgcgcgataaaggttacttgatgtctggtgacctggtgattgtcacccagggcgacgtgatgagtaccgtgggttctactaataccacgcgtattttaacggtagagtaagtacgttgccggatgcggcgaaaacgccacatccggcctacagttcaatgatagttcaacagatttcgaatattctgaagcaaacttgaacttatcatcaggcgaaggcctctcctcgcgagaggcttttttatttgatgggataaagatctttgcgcttatacggctggatttcgcccggtttgcgagttttcagcaattttagtatccaggtgtattgttctggtcgcggaccaacaaaaatctcgacttcttcattcatccgccgcgcaatcgtatgatcatccgcctctaacagatcatccatcggtgggcgcacctgaatcgtcagacgatgcgtcttgccatcataaatcggaaacagcggtacaacgcgcgcacggcacactttcatcaaacgaccaatcgcgggcaacgtcgctttataggtggcaaagaaatccacaaattcgctgtgctctgggccatgatcctgatcgggtaaataatatccccagtacccctgacgtaccgactggatgaatggtttaataccgtcatttctcgcatgcagacgaccgccaaagcgacgacgcaccgtgttccagacataatcaaaaaccgggttgccctgattatggaacatcgctgccattttctgcccttgcgaggccatcagcatggcaggaatatcgacggcccaaccgtgcggcaccagaaagataactttctcgttattacgccgcatctcttcgatgatctccagcccttgccagtcaacgcgcggctgaattttctccggcccgcgtattgccaactcagccatcattgccatcgcttgcggcgcggtggcaaacatctcatcaacaatcgcttcgcgttcagcttcactacgttctggaaagcagagcgacagattgattaacgcacgacggcgtgagctttttcccagtcgtccggcaaaacgtcccagccgtgccagaatgggatcacggaactttggcggcgttaaagcgatacccgccatcgctgctacgcccagccatgctccccagtagcgcgggtggcgaaaggatttatcaaactcaggaatgtattcgctattattttttttcgtttccatgcttttccagtttcggataaggcaaaaatcaatctggtgatagtgtagcggcgcaacttgccccgcaccaaataaaaaaagccggtactgactgcgtaccggctgcgaatggatgttaattaatcaaaccgtagctgcggcacaatctctttggcctgcgccaggaattcgcgacgatcggagccggtcagcccttcggtacgcggcagttttgccgtcagcgggtttacggcctgctggtttatccatacttcatagtgcagatgcggcccggttgaacgtccggtattaccggaaagcgcgatacggtcgccacgtttcaccttctgtcccggtttcaccagaatcttgcgcaagtgcatataacgcgtggtgtagctgcgaccatgacgaatagccacataataacctgctgcgccactgcgtttggcaaccaccacttcaccgtcacccactgaaagcactggcgtaccctgcggcatggcgaaatcaacacctctgtgtggtgcaacgcgaccggtcaccggattagtacgacgcgggttaaaattagacgagatacggaactgtttcgccgtcgggaatcgcaagaatcctttcgccagaccagtaccgttacgatcgtagaatttgccatcttcagcgcggatagcgtaataatctttaccttctgaacgcaaacgtacgcccagcagctggctttgctcacgtttaccatcaagcatttctcgagacattaacaccgcaaattcatcgccttttttcagtttgcggaaatccatttgccactgcatggctttaatcactgcgctcacttcggcgctggttaaaccggcgtttctggcgctggcaacaaagcttcccccgacggtacctttcagcagattgttaacccactctccttgctgcatttcgctggtcattttaaaaccgttagcggcagtacggtcataggttcgggtttcacgacgagacacttcccaggtgaggcgctgcagttcgccgtccgcggttaatgtccaggagagttgttgaccgattttcaggttacgcaattctttgtcggccgcagccagttgggtgatatcacccatatcaataccatactgattgagaatgctgcttagcgtatcgccagtggaaacaacatattcatgcacgcccgcttcaccggcgattttgtcatccagttcgtcctggggaatggcttcatcttcttgtgcagcttgatcaatcggctcactggcttcaggtaagagcgaacgaatttcgttctgttccagctcaatggttttgacaattggcgtggcatcacggtgataaacataaggccgccagacagcgacggccagagtaagaacggtgagcgaccccaacataacgcggtgtggtcgcggtaaattattaaacgccagggcgacagagcgggctatctgttgcacgtaatcacttcctcattaatctcctttcaggcagctcgcatactggttggctaattgactcaggaattctgaatagcttgttttacccagtttgatattcgtccccaggggatccaacgttcccatacgaacggatgtccctcgtgcgacgctctcaacgaccgctggcctgaactgtggctcagcaaaaacgcaggttgctttttgctcaaccaactgtgttcttatttcatgtaaacgctgcgcgccaggttgaatctcagggttaacggtaaaatgaccaagcggtgtcagtccaaactgtttttcgaaatagccgtaagcatcgtgaaaaacgaaataacctttccccttgagcggcgcgagctcgttaccaacctgcgtttcggttgaggctaattgtgcctcaaaatccttcaggttggcgtcaagtttggctcgactttgcggcataagttccactaattttccatggattgcaaccgctgtagcccgcgctatctctggggaaagccaaagatgcatgttgaaatcgccgtgatggtgatcttcgtcacttttttccgcgtggtcgtgatcatcatcatcgccgtgaatacttttcatcagtagcggtttcacatcttcaagctgcgcaatcgttacctgcttcgctcctggtaatttgcttaccggtttttgcataaacgcttccatctccgggccaacccaaacgactaagtccgcgttctgtaagcgttttacatccgatgggcgcagtgaataatcatgttctgaagcgccgtcaggaagtaaaacctctgtttctgttaccccatcagcaatggcagaagcgatgaacccaacgggtttaagcgaagcgacaacggcggcatctgcggcctgtgttgcacctccccagagagcggcggataatgctgcgaaaagaagcgtttttttatgtaacataatgcgaccaataatcgtaatgaatatgagaagtgtgatattataacatttcatgactactgcaagactaaaattaacatgacaagtctggtttccctggaaaatgtctcggtttcttttggccaacgccgcgtcctctctgatgtgtcgctggaacttaaacctggaaaaattttgactttacttgggccaaatggcgcaggtaagtcgacactggtacgggtagtgctcgggctggtaacacccgatgaaggggttatcaagcgcaacggaaaactgcgcatcggctatgtaccgcagaagctgtatctcgacaccacgttgccactgaccgtaaaccgttttttacgcttacgccctggtacacataaagaagatattttgcctgcactgaaacgtgtccaggccgggcacctgattaacgcaccgatgcaaaagctctctggtggcgaaacgcagcgtgtactattagcgcgagcattgttaaatcgcccgcaattattagtgctggatgaacccactcaaggcgtggatgtaaatggccaggtggcgttatatgaccttattgaccaactgcgtcgtgaactggattgtggcgttttaatggtttctcacgatctgcatctggtgatggcaaaaaccgatgaagtgctgtgcctgaatcaccacatttgttgttccggcacaccggaagttgtttccctgcatccggagtttatttcaatgtttggtcctcgtggtgctgaacaactgggtatctatcgccatcatcataaccatcgtcacgatttacagggacgaattgttttgcgtcggggaaatgatcgctcatgattgaattattatttcccggttggttagccgggatcatgctcgcctgtgccgcgggtccgctgggttcgtttgtagtctggcgtcgtatgtcttatttcggtgatacgctggctcatgcctcattacttggcgtcgcgtttggtttgttgctggacgtgaatccattctatgcggtgattgccgttacgctgctgctggcgggcggtctggtatggctggagaagcgtccacagctggcgatcgacacgttattagggattatggcgcacagtgccctgtcgctgggcctggtggtcgtgagtctgatgtctaatattcgtgttgatttgatggcttacctgttcggtgatttgctggcagtgacgccagaagatctcatctctattgcgattggcgtggtcatcgtggtggctattttgttctggcaatggcgcaatttgctgtcaatgacgataagcccggatctggcgtttgttgatggtgtgaaattacagcgagtgaaattgttgttgatgctggtgacggcattgacgattggtgtagcgatgaaatttgtcggtgcgttgattattacttcgttgctgattattcctgctgctactgcgcgtcgctttgcccgcacgccggaacagatggctggtgtcgctgttttggtggggatggtggcagtgactggcggtttaaccttttccgcggtttacgatacgccggcgggtccgtcggtggtgctatgtgcggcactgttatttattctcagtatgatgaaaaagcaggccagctaatctatcgctgaacacatttgtcggatgcggcgcgagcgccttatccgacctacggttcggtatctctggtagtcctggtaagacgcgaacagcgtcgcatcaggcatattgccagtgccggatgcggcgcgagcgaccaatccgacttacggcatttctggcggcgttatgccaaagtgattccacgcccgcgtcgtcgccatacgcccacgcggtgtacgctgcaaaaagccttgctgaatcaaataaggttccagcacatcctcaatggtttcacgttcttcgccaatggctgccgccaggttatccagacctacaggtccaccaaagaacttatcgattaccgccagcaacaatttgcggtccatataatcgaaaccttcagcatcgacattcaacatatccagcgcctgagcagcgatatctgccgagatggtgccatcgtgcttcacttcggcgaaatcacgcactcgacgcagcagacggttggcaatgcgcggcgtaccgcgagcgcgacgagcaacttccagcgcgccgtcatcactcatctcaagccccataaagcgtgcgctgcgactgacgatatattgcagatccggcacctgataaaactccagacgttgcacaataccaaaacggtcgcgcaacggtgatgtcagcgaacctgcgcgcgtggttgcaccaatcagggtaaacggcggcaaatcaattttaatggagcgtgccgccggaccttcaccaatcatgatatccagttggtagtcttccattgccgggtacagcacttcttcaacaactggcgatagacggtggatctcatcaataaacagcacgtcatgcggttcaaggttagtgagcatcgcagccaaatcgcccgccttttccagcaccggaccagaagtcgtgcgtaaattaacgcccatttcattggcgacaatgttggcaagcgtagttttacccaaccccggaggaccaaaaatcaacaaatgatcgagggcatcgccgcgcagtttcgctgctttgatgaaaatctccatctgtgaacgaacctgcggctgaccaacatactcttccagtaatttggggcgaatggcgcgatctgctacatcttccggcaaagtggtaccggcagaaatcagacggtctgcttcaatcatcctttacctcataacgcggcgcgtagggcttcgcgaattaaagtttcactgctggcgtcagggcgagcgattttgctcaccatgcggcttgcttcttgtggtttatagcccagcgccaccagcgcggcaaccgcttcttgttcagcatcgtcggtcgccgggctggcaggagacgtgagtaccaggtcggcggctggcgtaaagagatcgccatgcaaacctttaaatcggtctttcatttcaacaatcaagcgttcggcggtttttttgccaatacccggcagtttcaccagtgcccccacttcttcacgctcaacggcattaacgaactgctgcgctgacattccggagaggatcgccagcgccaacttcgggccgacgccgttggttttgatcaactctttgaacaatgtgcgctcttgtttattgttaaaaccgtacagcagttgcgcgtcttcacgcaccacaaagtgggtgaaaacgatcgcttcctgacccgcttcagggagttcataaaaacaggtcatcggcatatgcacttcatagcctacgccgcccacttcaattaacaccagcgggggttgtttttcaatgatgatgcctctgagtctgcctatcacatgacgctcctgcgtaatgaatcaaagataatgctgtatgataaaaaaatgctggatagatatccagcgaaggatgaagaaaacttgcgaggtgtctcgatgaactgaaaaatggcacagtataatttattctacaggttatattggaagcaaatattttaatattacatattcagtgaagaaatgcgtaataaaaatatacattgcgcctcctgaaaaaataaattttttatgctattacgtatatttgtatctatttcaatggaatgacaacgtgaatattaattaccctgctgaatatgaaattggagatatcgtctttacatgtataggtgctgccttatttggtcaaatatcagctgcatcaaattgctggagtaatcacgtcgggatcattatcggtcataacggtgaagacttcctggttgcagaaagccgggttcccctttcaaccatcaccacgctatctcgttttattaaacgttcgtctaatcaacgctatgctataaagcgattagacgctgggctgacagaacgacaaaaacaacgaattgttgaacaggttccctcccggctacgcaaactttaccacaccggttttaaatacgaatcttcgcgccagttctgttcaaaatttgtttttgatatttataaagaagcgctatgtattccggtgggtgaaatagagacgtttggagaattgttaaatagcaatccgaatgcaaaactcactttctggaaattctggttcctgggttctattccgtgggagcgtaaaaccgtcacgccagccagtttgtggcatcatccgggtttggtgttgattcatgcggagggagtggaaacgcctcagccggaactgaccgaggcggtataacttaacgcagtcgccctctcgccaggttcagccgcgattcgctcatctgcatcgcattctgactaacgtggcagtgggtgatagcaatcgccagcgcatcggcggcatccgcctgtggattagcgggcagtttcagcaaggtgcggaccatatgctgcacctggcttttttcggcactgccaatacctaccaccgtttgctttacctgacgtgccgcgtattcaaatactggcaactcctgattcaccgccgccacaatcgccacgccgcgcgcctggcccagtttcagggctgagtcagcgttctttgccataaagacttgttcaatggcgaaataatcaggctggaactgggtgatgatttccgtcacgcccgcatagatgagtttcagacgagacggtaaatcatccactttggtgcggatgcatccgctacccaggtaggacagttgcctacctacctggcggatgacgccgtagccggtcacgcgcgaacccggatcaatgccgagaataatagccatcacgcgtctccgttttgctgtttagcaggcctcatcagagagtcgctgcgacctcatcagagatttcaccgttatggtaaacttcctgcacgtcgtcgcaatcttccagcatatcgatcagacgcatcagtttcggtgcggtttctgcatccatatcagctttggtagacgggatcatggaaacttccgcgctgtctgctttcagacctgccgcttccagagcgtcgcgcactttacccatttcttcccatgcagtgtagacatcaatcgcgccgtcatcataggtcacaacgtcttcagcacctgcttccagtgctgcttccatgatggtgtcttcatcgcctttctcgaaggagatcacgccttttttgctgaacagataggcaacggaaccatcagtaccgaggttaccgccacatttgctaaatgcatgacgcacttcagcaacggtacggttgcggttgtcagacagacattcaatcatgattgccgtgccgccaggaccgtaaccttcgtagatgatggtttccatgtttgcatcatcatcaccgcccacaccacgtgcaattgcgcggttcagtgtgtcacgggtcatgttgttagacagtgctttatccaccgccgcacgcagacgcgggttagcgtccggatcgccaccgcccagcttagccgcggttaccagctcacgaatgattttagtgaagattttaccgcgcttagcatcctgcgcagctttacgatgtctggtgttggcccatttactatgacctgccataaaaatatctccagatagccctgcctgttcaggcagcgttaattacaaactgttcaatcgcctgccggttgctccaggacttagtgagcgccgccgcagcaggcgcatcaagccacttgtaagccagatgttcagtgaaaacgatctgccgctcgtgcggaagcgcaagacagaaccatgattccgtattacgcgtcacgcccggcgcatagcgatgacgtaaatgtgaaaaaatttcaaactctaccgtgcgctgacagtcaattaaggtcagttgttcagcgacaacatcaatggtgacctcttcctttacttcgcgcatggcagcttgcggcgcggtttcaccctcttccacgctgccggttaccgactgccagaaatcgggatcgtcacgccgctgcaacatcagcacccgtttcgtatcttgtgcgtagatgaccactaagatcgaaacgggacgcttatacactttatccttcacgctgcctcttcgttgactgccttcgctcatcccattcacatagttatctatgctcatgggagttcactcagttgccgcctcgatgcaacgcgaatgatttcgtgtatttgagtcatatcagttattctcagccttcttcacaacctgaatgctcagctcagccagtgcagtcgggttagcaaagctcggtgcttcagtcatcagacacgctgccgccgtggttttcgggaaggcgataacgtcacggatattgtcggtgccggtcagcagcatggtcagacggtcaagaccgaatgccagacctgcgtgcggcggagtaccgtatttcagagcgtcgagcaggaagccgaatttctcgcgctgttcctcttcgttgatacccagaataccaaacaccgtctgctgcatatcaccattatggatacgtactgaaccaccgcccacttcgtaaccattgatgaccatatcgtaagcgttcgccaccgcattttccggtgcagctttcagttctgcagccgtcatatctttcggtgaggtgaacggatggtgcattgccgtcaggccgccttcaccgtcgtcttcaaacatcgggaagtcgataacccacagcggtgcccatttgctttcgtcggtcagaccaaggtctttacccactttcaggcgcagtgcacccatcgcgtcggcaacaattttcttgttgtcggcaccgaagaaaatcatatcgccatcttgcgcggcagtacgatccaggatgtcttcgatgatttctgcattaaggaacttcgctaccgggctgttgataccttccagacctttcgcgcgttcgttaactttgatgtaagccagacctttcgcgccgtagattttaacgaagttaccgtattcgtcgatctgcttacgggtcagcgatgcgccgcccggaacgcgcagagccgctacgcgacctttcggatcgttcgccggacctgcaaatacagcaaactcaacagatttcagcagatcagcaacgtcagtcagttccatcgggttacgcagatccggtttatcagaaccataacggcgttctgcttccgcaaaggtcattaccgggaaatcgcccagatccacacccttcacttccagccacagatgacgcaccagcgcttccatcacttcacgcacttgcggcgcggtcatgaaagaagtttccacatcgatctgagtaaattcaggctgacggtcagcacgcaggtcttcgtcacggaagcatttaacgatctgatagtaacggtcaaaaccggacatcatcagcagctgtttgaacaactgcggggattgcggcagtgcgtagaatttacctttgtgcacacgagaaggcaccaggtagtcacgcgcgccttccggcgtggctttggtcagcatcggagtttcgatgtcgaggaagccgtggtcatccataaaacggcgcaccaggctggtgattttagcgcgggttttcaggcgctgagccatttccggacgacgcaggtcgaggtagcggtatttcagacgcgcttcttcggtgttgacgtggttagagtcaagcggcagaacatctgcgcggttgatgatagtcagcgaggacgccagcacttcgatttcgccggtcgccatatcgcggttaatatttttttcgtcacgcgcacgtacggtgcccgtgacctgaatgcagaactcattacgcagttcagaggccagctttaacgcgtccgcacgatccggatcgaaaaatacctgcacgataccttcgcggtcgcgcatatcgatgaagatcaggctaccaagatcacgacgacggttgacccaaccacacagagtcacctgctgccccacgtgggacaaacggagctgtccacaatattctgtacgcatgagatatcccttaacttagctgccggcggatgccccctgctgcgcaggtgaccaagtcgcagcgttagctgtatgtcacaactgaatgaaaaaaggcggctattatactggaaattctgccgcaccgtaagagcctggcccgcgctggaacgcctcgttaccactttatatcgggcctgaaatcagactctacgccagtttgctataaaggtgttgcccgaactcataaaaattaacaaaatttgtcgttccgccatcggctaatcgcattaaggtgtgaggcacgattttgttttttcaggagtcattatgcttgaacttaatgctaaaaccactgcgctggtggtgatcgatttacaagaaggcatcttaccttttgccggtggtccacatactgccgatgaggtagttaatcgcgccgggaagctggcggcgaaatttcgcgccagcggtcagcccgtgtttctggtgcgcgttggctggtctgccgattacgctgaagcattaaaacagccggtcgatgcgccctcaccggctaaagtgttgcccgaaaattggtggcaacatcctgctgcattaggtgcaaccgacagcgatatcgaaatcatcaaacgtcaatggggtgcgttttacggtacggatctggagttgcaattacgccgccgaggtatcgatacaatagtgttatgtgggatctcgaccaatatcggtgttgaatccaccgcccgcaatgcctgggaacttggctttaatctggtgattgccgaagacgcctgtagtgccgccagcgccgagcagcacaataacagtatcaaccatatctacccgcgcatcgcccgtgtgcgtagcgtggaagagatcctcaacgcgttatgatttacatcggtctaccgcaatggtcgcatcctaaatgggtgcggttggggatcaccagccttgaagagtatgcccgccactttaactgcgtggagggcaacaccacgctttacgccctgccgaaacccgaggttgtcctgcgctggcgtgagcagaccacagatgacttccgcttctgttttaagtttccggcgaccatttcgcatcaggcagcattacggcattgcgatgatttagtgactgaatttttgacccgcatgtcaccgttggctccgcgcattgggcaatactggctgcaactgcctgccacattcggcccacgggagctgcctgcgctttggcattttctcgattctcttcctggcgaatttaattatggcgtggaagtccgccatccacagtttttcgccaaaggagaagaggaacaaacgcttaatcgcggtttacatcagcgcggcgttaatcgggtgattttagacagccgcccggttcatgcagcacgtccacacagtgaagctattcgcgacgctcaacgaaaaaaacctaaagttccggtacatgctgtactgacggcgacaaatccgctgatccgttttatcggtagtgatgatatgacgcaaaaccgggaattatttcaggtctggttacaaaaattagcgcagtggcatcagaccactacgccttatctttttttacatacgccagacattgcccaggcaccggaactggtacataccctgtgggaagacttacgtaaaacgcttccagagatcggagcagttccggctattccacagcaatcttctcttttctgaatttgccacctatcatagacaggtgccatcggccattttaaagggagtttgtatggtaagcgcgctgtacgccgttttaagtgcgttgttattaatgaagttctcttttgatgtcgttcgcctgcgaatgcagtaccgcgttgcctatggcgacggcggttttagcgaactgcaaagcgctattcgcattcatggtaacgcggtggaatatattcccatcgcgattgtgctgatgctgtttatggaaatgaatggcgcagaaacctggatggtgcatatttgcggcatcgttttgcttgctggtcgtctgatgcattattacggttttcatcaccgtctgttccgctggcgacgttccggcatgagcgccacctggtgtgcgctgttgctgatggtgctggcgaatctttggtatatgccctgggagttggttttctccctgcgttagcgcacaatacgccactttctttttcccggatttttacgttatgtctcaccgcgacacgctattttctgcccctatcgccagactgggcgactggacctttgatgaacgggtagctgaagtcttcccggatatgatccagcgttccgtacccggctattccaatattatttccatgattggtatgttagccgagcgcttcgttcaacctggtacgcaggtttacgatctgggttgttctctgggcgcggcgacgctctcggtgcgtcgcaacattcatcatgataattgcaaaattattgccatcgacaactccccggcgatgattgaacgctgccgtcgtcatattgacgcctataaagcccctacgccagtagacgtcattgaaggtgatattcgcgatatcgccattgaaaacgcatcgatggtggtgctgaattttaccctgcaattcctggaaccttccgagcgccaggcgttactggataaaatttatcaagggctgaaccccggcggcgcgctggtgctttcggaaaaattcagtttcgaagatgccaaagttggtgaactgttgttcaacatgcaccacgactttaaacgtgccaacggttacagcgaactggagatcagccagaagcgcagcatgctggaaaacgtgatgctgaccgattccgtggaaacccataaagcacgcctgcataacgccggttttgagcatagtgagctgtggttccagtgctttaactttggttcactggtggcattaaaagcagaggacgctgcatgatcgactttggtaacttttattctctgattgccaaaaatcatctttcacactggctcgaaacgctgcccgcgcagattgctaactggcagcgcgagcagcagcacgggttgtttaagcagtggtcaaatgcggtggagtttctacctgaaattaaaccgtatcgtcttgatttattgcatagcgttacggcagaaagcgaagagccactgagcgcagggcaaattaaacgcattgaaacgctgatgcgcaacctgatgccgtggcgcaaagggccgttctcactgtatggcgtcaacatcgataccgaatggcgttccgactggaaatgggatcgtgttctgccccatctttctgatttaaccggacgcaccattctggatgtcggctgcggcagcggttatcacatgtggcgcatgattggcgcaggcgcgcacctcgcggtggggatcgaccctacgcaactgtttctgtgccagtttgaagcggtgcgtaaactactgggtaatgatcagcgcgcgcatttgttaccgttaggtattgaacaacttccggcactgaaagcctttgataccgtcttttcgatgggcgtgctttaccatcgccgttcaccgctggagcatctatggcagttgaaagatcaactggtcaatgaaggtgaactggtgctggaaacgctggttattgatggtgatgagaacacggtgctggtaccaggcgatcgttacgcgcaaatgcgtaatgtctatttcatcccttccgcgctggcgctgaaaaactggctgaagaagtgtggttttgtagatatccgcattgcggatgtgagcgttaccaccacagaagagcagcgacgcaccgaatggatggttaccgaatcgctggccgatttcctcgacccacatgatccgggtaaaacggtggaaggttatccggcacctaaacgcgcggtgctgattgcgcgcaagccgtaaaggtctggtattactgccggatgcggcgtgaacgccttatccggcctacaaaaccttgctaattcaatatattgcagggactatgtaggcctgataagcatagcgcatcaggcagctttacgtttgcataacctcagcgcccgtttccgggcgctattcacgtcttacgcctgaacagctggctgatcaaacgccgttaacttcggtgcattgcccgtatatttttcgatatacaccaacgctgagttaccggcacaggcatttgccagctgcgagctggggatatccgccgttaacacgttcgcactgccgtttttacacaagccattttccagatctggccatgcaccttcatgcacgcataccacgccttttttgatcccgtcagtcaccaccgcgcctgtcaaaatctgaccacgtttgttccagacacgcaccagatcgccattcgcaataccaaagcgtgcagcatcttcggtgtgaatagtgattggttcacgatcggcgatcgcatattttttacgcagttccgcatagttaagctgactgtgtaaacggtgtgccggatgtgcggtcagaagctgtaactgcttctcgtcggcggtacctttccattcatcaggagccagccaggttgggtgtgccgggcaatccttatagccaaatttttccaacgtttttgaatagatttcaattttgccgcttggcgtacccagcgcatttttcaccggatcggcgcggaaatcaccataacgaacgtactgttcgttcttctcgctgtggcgcatttcgatcagtttattttgctgccagaaggcattaaacattggcatagtgacgcgttgcgcacgggcacctttctgagcggcatcatagaaaaatttcagccacgccatttcatctttaccttcggtatagatctcttttccgccaggtttgagtaattccgcaagatcggcaaacacgtcaaaatcgttacgcgcttcaaattgcggagcaacagcctgcttcatcggcacaatatgctggttgctgtaatcaccggtcatcgtcaagtcattgcgctcaaacgatgtggtgatcggtaatacgatatctgcgtgtttggctgctgcggtccagtagcattcagaaacgacgatcatctccggtttctgccatgctttaatcagacgattagtatcctggtgatgggtaaagttaccgccacccgcccaccagatcattttgatattcggatacgtttgttctttaccgttatgctgatatttgccgccaggattttccagcgcatcgacgatacgggcaacaggaatcgccgtcattccgccatcatcagcggcctcgctggcatgtccggcaatcgccgcagacatttccggcagcacgccgccaacacgcgtcgggttgccaccgttggagtaatgataagagaaaccaaaaccgccgcccggtgtaccaatctgccctaacatcgccgccagcgtcaccagcatccagtgtttctgttcaccatattgctggcgctgaattccccagcctgccatcagcattgtgcgattcgccgccatcagttcagcgagtttgactatctgcgcttccggtacgccagtaatttccgccgcccagaccgcgctcttcggcgtattatcgctcttacctgtcagatactcttcaaactgcggatacccggtagtgtatttttcaaggaacactttatcgtgtttgccttgtgtcatcagggtatgcgcaatccctaacatcagtgccacgtcggtgcccatattcggcgcgatccaggtggcattatcgtcaaagaattcgatggtttcggagcggataggatcaatggcaatcactggtttgccagattttttcagctgatggaagtattccagcccttgctcatcggtactgctccaggcaatttttaaggtattcagcgggttcattccccacagcaccacaacctggctgttttccagaatcagcggccaggaggtctgctgttcatacacctctacagaaccgaccacatgcggcatgatcacctgtgctgccccggttgaataatcgccgctatgcccggaataaccgcccgccaggttcatataacgttgcagtaaggtttgcgctttatgcaacacgccagaagagcgccagccgtaagatccggcaaaaatggccgatggtccgttagctttacgaatacgatcatgttgctcatgaatcagttttaatgcctgttcccagctcacctgtacataggtatcttcgccacgacctttcgccggttgcagtggattatcgagatagctttttctcaccatcggatgctgaatacgcgccgtggtgtgtacctgatccgccgccgtagactgtaaggaattcggtatggttttcgccagcgcgcctgttgaagaaacaatcttgccgtccttcacttctacgttcatcgctccccaacgtcccgcggtgaggattttaccgcccttctcttctgcccatgcggggagcggtgctgccgatgtcaccaccagcgctccagcggcaataccgctgtgtttaataaattcacgtcttgttaatgtcataacttcctccctgatcaacgaggatcactgtttctcggtaatatctttggcgttgtactggaaataccgcgttaaaatgtccagttcgttttcgctcatgctggttcgtgcccccattcctttggcaatggacggccacgcattgacggtgtaatggtcggcggcaataggggcatgacaaccagcgcaataggtatcgtcaagtttttcagcgtattgccatagcggtttacggtccgctaatgcgggatcggtaagcgcaccctgtaaagacgcctgacgccattgattgccgtattcgtcagcctgccattccccgtttacagtgagcgccttgataccttcttcacttaatgtggctagcgccagccgttgacctgccgccaggtagagcgtgttttcactgccctgcatttgataaccctgcaacagaacgatcggctgtttgccactggcatcaacgacggtgagatcggttccaggattcacggtagccagctcgcctatgtgagaagttttgaaaggataaatatgtgcgccattagtaactgaagtagcggcctgactttccagctcatgcgccgcgttgtcatccatttttatttctggcggaaaatgggcaatgcctttatgacaatcgatacaggtttcgctgtccttttgtgctttgttatgcattttctgcgcagattcactttgcgaggcaatatccatggcatcaaaagaatggcaactacggcacgttgcagagtcagtggcttttaattctttccatactgtttcggccatttcctggcgatgagcttcgaacttatcgtcactgtctattttgccgctaacaaattcatgataaatatctttagatgcctttaatttagcaaataaataatccatccctgactttggaatatggcaatcggcacattccgcacgtatccctttctggttcgaaaagtggacagttccctgatattcctcaaaaggtttactcatcgagtggcaggaaaggcaaaatgctgtatccgacgttttatgtaagactttttgcgccagcaataacccgccgccaccaaccacaaccgctatcagcaaaaacaataacccaatgcgttttttccctcgcatagattcctctaattaaattactggacaccgaaatcattgtataattaaatatacaacgaattaaccgcttgcataattaggcacaacactgcctgaaacaatcgataaagaatatgatttattacaatgtaatcattaattgctaaggaataacccagttgctatttagaatatatatttatcagttttagtaatttaaatcccataattaatgtgaatatatacaatatttttagcacaacgctatgcgcactgtcacccgctcaacagatcacggttatcgttcgttttttatactgttcagggataaaaaaaggcccctgttgaaattgcaggggcctggtacgagcaagcatcatattgggcgacatgatgcaacggtaaaaatcatttggcctgatggcgttcaatgattcctttcatttcagcaaccgccgccccgtctacgatataacgcgaatactcgtccgcgtgttcatctgatgacatggacaatccttgattacgataacgcatcggtgaggcttgccacgctcccgcggagctatggacttccagcactccggcatcgaggaagtggtgcaggttttctgcacggactcctgctccggccataatgattggagcatcacgatgggcaataagttccataatttttgataaaccttgcagtgcgtctgatttttgccctgatgtcagtacccgggcaatgcccaattccgcaagattattgagtgtatataaagggttagcgcacatatcgaaggcgcgatgaaaagtcactgccagcggaccggcagcagccattattttttccattcgtggcatatcgacattcccgtcaacatcgagaacgcccgtcaccagtccaggaaaacctaattcgcggaccgtgcgcacatcctcaagaatggcggcaaactcaccgtcgctgtagcaaaaatcaccaccgcgtgggcgaattatcggatgcacagggatcgtcacccgctggcgcacggatttcagtacacccaacgacggcgttaagcccccctcttttggggctgcgcataattcaactctgtctgcgccgttttgctgcgccgttagtgcacattccatgctgtaacagcaaatttccagtaatgccatttttactccttaattacgccgactgctcgctggcaacgatctcttcaatggaccacggatgaaacttaatagttgttttgccatcggtgaccgccagcgtcggattcggtaatcgctcatgctcaccttttggcgaactggttttcactgagatccccggtaggctgagtccttcatcagaaagcaatgccagcgcacgggcattcagcgtttctggatcacccggcagaacgatttcaatatgttcccaaccttcgtgtgggtaacgtttttccccgggccacggtagctccacaatagaaaactgccagtgcgcaacctgtaccggttcatgcaatttaaacagacaaatcggtctgccattgatcatattttctgacaaaagctcgccacactgttcaaacccgcgacgccagcgttcagcagtggcgttttgatggcaacgcaaagaaatgtgatcggcagtcagcggagtgatattcaaccccagacggcgggaaagttcatctaatgcgtggataaatcgcggtaaatccgatgcaatatcctgcagctcgtcgatagattgccagttcgccataatcactcttcgtctttcagtaaaagcgttaatttaccctgttgccctgtgccaaccaaccgctgatttcacgccgcttctgatgcaatagtgaaaacggcaatacgccacgcgcacgttgctgacgaaaacagccatttgcagtatactcccgccctaatttctttaactggtgcgggcaatttttgctcgcttcatcaatgtaaggtattccggtgaatattcaggctcttctctcagaaaaagtccgtcaggccatgattgcggcaggcgcgcctgcggattgcgaaccgcaggttcgtcagtcagcaaaagttcagttcggcgactatcaggctaacggcatgatggcagttgctaaaaaactgggtatggcaccgcgacaattagcagagcaggtgctgactcatctggatcttaacggtatcgccagcaaagttgagatcgccggtccaggctttatcaacattttccttgatccggcattcctggctgaacatgttcagcaggcgctggcgtccgatcgtctcggtgttgctacgccagaaaaacagaccattgtggttgactactctgcgccaaacgtggcgaaagagatgcatgtcggtcacctgcgctctaccattattggtgacgcagcagtgcgtactctggagttcctcggtcacaaagtgattcgcgcaaaccacgtcggcgactggggcactcagttcggtatgctgattgcatggctggaaaagcagcagcaggaaaacgccggtgaaatggagctggctgaccttgaaggtttctaccgcgatgcgaaaaagcattacgatgaagatgaagagttcgccgagcgcgcacgtaactacgtggtaaaactgcaaagcggtgacgaatatttccgcgagatgtggcgcaaactggtcgacatcaccatgacgcagaaccagatcacctacgatcgtctcaacgtgacgctgacccgtgatgacgtgatgggcgaaagcctctacaacccgatgctgccaggaattgtggcggatctcaaagccaaaggtctggcagtagaaagcgaaggggcgaccgtcgtattccttgatgagtttaaaaacaaggaaggcgaaccgatgggcgtgatcattcagaagaaagatggcggctatctctacaccaccactgatatcgcctgtgcgaaatatcgttatgaaacactgcatgccgatcgcgtgctgtattacatcgactcccgtcagcatcaacacctgatgcaggcatgggcgatcgtccgtaaagcaggctatgtaccggaatccgtaccgctggaacaccacatgttcggcatgatgctgggtaaagacggcaaaccgttcaaaacccgcgcgggtggtacagtgaaactggccgatctgctggatgaagccctggaacgtgcacgccgtctggtggcagaaaagaacccggatatgccagccgacgagctggaaaaactggctaacgcggttggtattggtgcggtgaaatatgcggatctctccaaaaaccgcaccacggactacatcttcgactgggacaacatgctggcgtttgagggtaataccgcgccatacatgcagtatgcatacacgcgtgtattgtccgtgttccgtaaagcagaaattgacgaagagcaactggctgcagctccggttatcatccgtgaagatcgtgaagcgcaactggcagctcgcctgctgcagtttgaagaaaccctcaccgtggttgcccgtgaaggcacgccgcatgtaatgtgtgcttacctgtacgatctggccggtctgttctctggcttctacgagcactgcccgatcctcagcgcagaaaacgaagaagtgcgtaacagccgtctaaaactggcacaactgacggcgaagacgctgaagctgggtctggatacgctgggtattgagactgtagagcgtatgtaatcgatttttcgtgagagtgaagcctgatcagggttagccgatcaggcttttttattgccatctaaatgtattctgaaaatggacatgccattgttttctcactgttggataagaggccagaagcgtaatatccggccccagggaaacgataacggttgaatttaaggaataccgcagtgtttaaatttcttgtattaacattaggcattatctcttgccaggcttacgcagaagatacggttatagtaaacgaccatgacatttcagccatcaaagattgttggcaaaaaaattcagatgatgatactgacgttaacgtgatcaaatcatgcctgcgacaagaatacaatctcgtcgatgcgcaattaaataaagcctatggtgaagcttatcgttatatagaacaagtgccacgcacaggtgtaaaaaaacctgataccgaacaacttaacttgcttaaaaaatcacagcgagcctggctggattttagggacaaagaatgtgaattaatcctttcaaatgaggacgttcaggatttaagtgacccttattctgaatcagaatggctctcatgtatgatcatacagaccaatacgcgaactcgccagttgcagctataccgtaactctgaagatttttatccaagccctttgacaagaggataattcacatctttttggcatgttttgttgcaagctattcctgataaataattgcaacaagacatcgagcctttttcactgagttattaaacatactcgcgagcgcgtaatttttttgtccttcagcgataattcacaatcacttcattacgttgtacctttagcggtggaattaaccgcccaccgcctggcacttcccagataaatcgcaacggttctgctgccgctataccggaaaaggccacggtggttccgctctgcccctctaattcgacacaacgagattgcgaacacaagcgaacccgcagtcctgaaggtgtcgggccgataagctgataacgccacgctaccagcgtcatcaatcctgaagcaggttgtcgcgtagaaagaggcgcagacgacatcgactcaccgcgatgatttagcgtaattcctacactacttgcctgccacatcccctccccggcggcttgcaccagcagcggaaacaataatattgctaataaggttctcattatttgccgccaattgtcgccgtcatgcggatatgtcggttatcagacagttccagattcgacaggaccactaactgcggcaagctgcggcgcaggaagcgagacaataatggtcgcagcgcgtggttcaccaacaatactggcggcgcacccagcatctcctgacgggatagcgcttcctgagtttgcgccagtaaacgatccgccagccctggctccagtcctcccccgccctgcagcgcctgtagtaacaaacgttccagcggtgtatcgaggccaataacatggacttcatctttgccaggaaaccactgctgggtaatcgcccgtcccaacgccacgcgcacgacggcggttaattcatgtggatcgctttggatgggcgcatgttccgccagcgtttcgagaatggtgcgcatatcgcgaatcggtactttttcatcgaggagattttgcagcactttatgcagtgtggtgagcgtgacgacgccaggaacgagatcttccgtcagctttggcatctcctgggcgacgcgatccaacagctgttgcgcctcctgacgaccaaacagctctgcggcatgctggctaatgaggtggttaagatgcgttgctaccaccgtgctggcctcaaccactgtgtacccctgaatctgcgcctgttcttttagcgcactttcaatccagatagcattcaggccaaatgccggatcgacggtcgcctcaccaggtaacgtcccggcagcggttccagggttaatcgccagccagcgccccggataagcatcaccactgccaatctccacgcctttcatcaaaatgcgatagcgggcaggttgcagatccatattgtcgcgaatgtgcaccactggcggcagaaatcccatctcctgggcaaatttcttgcggatactgcgtatacggcccaacaactcaccatcctgctggaaatcgaccatcgggatcagtcgataacccacttccattcccagagaatcttccagttgtacatcgttccacgtcgcttcgacaacggtattattctctgccatttttaccggtttgggttcggcaggcgctttttgttcgcgtccgcgtatccaccaggccagcccgagcaatccggcagtgaacagcaaaaataccaggttcggcattccaggcaccaggccgagtaaaccgagcacggcggcgcttaacaacataacgcttgggttactgaaaagctgattcaccatctgctcgccaacatcctgatcggtgctgacacgcgtaacgatgacccccgcggcggtagaaatcaccagcgccggaatttgtgccaccagaccgtcgccaatggtcaatagcgtataactttccgccgcgtgtcccatgctcatgccatgttgcagcacgccgaccagcaacccgccgacaatgttaatgaccatgatgaggatcccggcgatggcatcgccgcgaacaaacttacttgccccgtccattgagccgtaaaaatcggcttcctgagtcacttcggagcggcgttttttcgcctcatcttcaccaatcaatccggcgttaaggtcggcgtcaatcgccatctgcttacccggcataccatcgagaacaaagcgcgcacccacttctgcgatacgcccggcacctttggtaatgaccataaagttgatgatcacgagaatgacaaacaccacgataccgatagcgaaattgccaccaacgaggaagtgaccgaacgcttcgaccaccttccctgccgccgccgcgccggtatgcccttccattaaaatgatacgggttgaagccacgttaagtgccagacgcaacagcgtggtaaacaacagaatggtcggaaacgcagcaaactcaagcgtgcgctgggtaaacatcgccaccagcaacaccatgatcgacaaggcaatattgaaggtaaacaacaggtcgagtatgaatgcgggcagtggcagcaccatcatcgacaagatcaacaggatcaaaatcggtccggcaaggatctgccattgtgtcgatttcaggtttgcgggcaggcgcagcatcgcggccagattactcatgggtcggtttctcgttaataaaatccagggcttccggcaccggaagatgagtaggttgtacagggcgctgtccaccagccagacgccagcgtttcagttgccagacccaggccagcacttccgccaccgcggcgtacagttgacccgggatttgttgaccaatctccgcatgtcgatacagcgctcgcgccagcggcggcgcttcaagcgtcgggacgttattttcagcgccaatttcacgaatgcgcagcgcgaccagccctgcacctttagcgaccactttcggtgcgctcattttgttttcgtcatactgcaacgctaccgaatagtgggtcgggttattgacaatgacatccgctttcggcacatcggccatcatccgacgccgtgcagcagctcgctgcatctgacggatccgccctttaacatgagggtcaccttcgctttgtttgaactcatcacgaatatcctgccgtgacatacgcagctttttcaggtggctgaatatttggaaaaagacgtcaaatcccaccattggaatgacaccaagcaccaccagcagtgcgcatagccctaccaaatccatcgcattacccatggcggtaatcggagactcggccatcaagcgcatcatctgcggccagtgatgccagagaaaaaaccccgtcacgctgccaaccaggatggttttcaaaattgctttaagcaactccgcgccagtctgagccgagaacatccgtttaatgcccggtagcgggttgagtttggaaaacttcggctgcaaggatttgccgctaaataccagccctcccagcatgaccggagaaatgagcgccaccagcaccacgccgctaatcagcggcagcagcgccagcatggcttctctgatcagcagaataatctgcccgaggatcagattcgggtcattgataatactgtgatcaaaatgcagcccagcggagagcatgcccgacaatcgacgggccagcgacacaccgccaaaccagataacactaacgcccaccagcaaaatcagcagtgaggtcagttcacgggaacgcgggatttgcccctcttcccgcgctttttctagtcggtgaggtgtgggggcttctgttttgtcgtcgctctcgtcagacacgtcgccaatcctggaaagagtattaagcgtgaatgatgccagagcgcaaagcgttcaatggtttgagtaaggggcaaaacaggcgggatttagggcttttgctgccacacatcaagcatagtgtgcgtttgtcggatgcggcgtcatcgccttatcagaccgcctgatatgacgtggtcacgccacatcaggcaatacaaatcaaaatccaagactatccaacaaatcgtccacctgatcctgactggctaccacaccggctttgctggtatcgacctgaggtccattaagcaaactctggttttcacgttttggacgcgactcctgttccgggatgttttccaacagcaccatcagcaactggcgttcgatctcctgaatgacatccatcatccgcttaatgacctgcccggtgagatcctgaaaatcctgcgccatcatgatttccagcagttgcgcgttagtaaagctggtatgcgcgggtacatctgccagaaattgtcgtgtatctgttaccagttcacgggcgtcggcaaggtcaatcggatcggcaaaccagtcatcccaacgttgggttaacgcttttgctgatttctccatttgatcctgatgcggttgtgacgcctcaacactgttcagcgcccgctccgcagcctgggcggtcatctgcacaacatagtacaaacgatcgcgcgcatcggggatggcttccgccgcttcggcaatggcctgatccagccccagttcccgcaaactgtcgcgcagcatacgcgtcaggctgccgatgcgcgcaatgatatcgccagctgaatgctcgtcagcaggtttgattgatggttgcatcatagtcgcatcctcacatgcccagtttctcaaagattttgttgagtttttcctccagcgtcgcggcggtaaatggcttcaccacatagccactggcccccgcttgcgccgcagcaatgatgttctctttcttcgcttctgcagtcaccattaacactggcaatgccgacatcgcgccatccgcacgaattgttttcagcaattccaggccatccatattgggcatgttccagtcggagataacaaatccataaccgcctgcctgcaacttattgagagcgtcgacgccatcttccgcttcctcaacattattgaatcccagctctttcagcaggttacgcactatgcgtcgcatggtggaaaagtcatccacaaccaaaaatttaagttctttatccgccatttcacactcctgatttaaatacgtatcgcctgtccggcactaatttttgccaacatttgctggcttacctggctaagatcgaccacttcgcagacaccacccatattgatggcctcgcgcggcatgccgaacaccacgcaacttgcttcgttttgcgcaagggtccatgcccccgcctgacgcatcgccaacattcccgccgcgccgtcgttgcccataccggtcaggatcaccccaaccgcattacgccccgcctgtttggcgacagaatggaacaacacatctaccgaaggccgatgacggttaaccgccgggccatcgtgaattttgatttggtaatttgcgccactacgcgacagctccatatgccgatcgcccggcgcaatataggcatgccccggcaagacacgttctccgtcttcggcttctttaaccccgatctggcaaagcttattaagtctgtcggcaaaagagcgggtgaaaccgggcggcatatgctgggtaattaacagtgccgggctggaaagcggcaacggttgcagtacgtgacgaattgcctcagttccacccgttgaagcaccaatcgcaatcagtttttcagaactcaacaacggccccgccttcagcgttgtcggtgccgacaatggcttatgtgctgcaaggctcgcctttgctgccgtacgcaccttttcagcaatcatttcgttatacgccagcataccttcgcgaatacccagttgcggtttggtgacaaaatctatcgcccccagctccagcgcgcgcagcgtgacttctgaccctttgccggtcagggaagaaaccatcacaacgggcattggacgcaaacgcattaatttttcgaggaaatccagtccgtccatccgcggcatttcaacatccagcgtcagcacatcgggattgaatttcttaatcaagtcacgcgcgaccagcggatcaggcgcggtcgccaccatttccatgtcgctatggctgttgatgatttctgtcatgatctggcgcatcagtgccgaatcatcgacagataacaccctgattttgctcatcgttaatccttacttagcgcatacaccgtctgaccacgcagcgtgaagcggcgctcaaggtggctaaagttttcagagtgacccgcaaacagcaatccgtcgggtttaaggagcggaacaaagcggcgcaaaatctcctgctgggtagtttgatcgaagtagatcatgacgttacgacagaagatcgcatcaaacggccccggcacggtgtactgtttcgccagtagattcagcggggcaaaatcaacatagttcgccagctcctgacgcacgcgtaccagcccttcatgcggccccgtccctcgcatgaaataccgttgcagttgctgcggcgtcaggtttttcaactcttcatggcgatagataccgcttctggctttttccagcacttcggtgtcgatatcactggcaaacactttccagcgtccgggcgcggtgcccaatgtgtcagccagcgtcatcgcaatgctgtacggctcttcgccggtcgaagccgccgcgctccatacgcgatactcgccagaacggcgacgtgcgtgatccgcgagcagagggaaatgatgtgcctcacggaaaaatgccgtcagattcgtggtcagcgaattgataaacgcctgccactcaccgctgtgctgattagattccagcaagttcagataatgaccgaaatccgtcagtcccagcgaacgcaaacgacgaaccagtcggttgtaaaccatgtcgcgtttatggtcagccagaacgatcccggctcgttgatagatcaattgacttatccgccgaaaatgcgcgtcggaaagcgccaggcgctcggtcatctgtaacaataaagacgtttgcccacagggcagagatgaagtcatagcgccttctcaatcacttcaggataccactggcgcaatttgtaactgcaccgactcatgtcgtgctacttcatgttcttcaagggtaaataccgccacacgcgacgaaagatggtcggcctgattcgccagttgttccgttgccaccgccgcttcttctaccagcgaggcgttctgctgagtcacctgatccatctggctgacagcctgtgcaacctgctcaatcccccgctgttgttcttccgacgcagaggcaatttctcccataatgtcgttcacgcgggtcaccgaactgacaatatcgatcatggtcgcggcggcgttattcaccagtttcgaaccctgctggacacgattgactgactcttcgatcagccctttgatctcttttgctgcctgcgcgctacggctggcaagattgcgcacttcacctgccactaccgcaaaaccacgcccctgctctccggcgcgagccgcttccactgccgcattcagggccagaatattggtctggaaagcaattccgtcgataacgctgataatgtcgccaattttttgcgagctggtggcgatctcctgcatggtgtgagtcatggtactgacctgaacaccgcccgcctgcgccgttgtcgcggcattttttgccagttccgacgcctgtcgtgcgttatcggcgttttgccctaccgtggcggttaattgctccatactggcggccgtttgtgccagcgatgccgcctgctgttcggtacgacttgagagatcgttattgcctgcgacaatctccgcgataccaatgtgcatctcctggcttcccttacgcacatcacttaccgtcccacgcaaagcctgctgcatggtcttcagactggcaaaaatggcggtgatctcattacgaccatataccgcaatcggacgcgccagattacccgcagcaatgctgtcaaaatggctaccgataatggccagtggttgaacaatcatcttgcgcgtccaccacagcgcactgctgatgtagatcgccgcaacaataatcatgctgataaacaccagtgccgaaatctgatagttacgctggctttgcgcactggcggcttccagcacatggttgatctccagctgccaggcctcaaagttaacgtcaaacgcattctgtgatccctgcaccggcgcagtgaggaaatccgaaagttgattactttcaagccaggtcgcctgatgttcgagatcgttgtgccagcgggcaaaacttttctccgtctctttttgcaatcccctgacgtgctcgttgcccgcagtcatcgccataaaacttttaaacagcgtggtggattgcgtcagactggcgcgcgccgtcgtcatcaacgttttaatgtcatccgccggatagctaagtgccgtcagagtgcccgctttgttcagcgcggtactggcctgtaacattaccgcccgagtttgcgctaatgccgcacgttgctgattgctctgctcgacctgattcagtcgttgcaaatcgtcgcgaaatgcccaaaaagacatgccgttactgccaatctgcaagatcccgcagagaatcaaaattaaaaacagcgtggtcgaaattcgaatacgattaaacatcaacgctccccatcaggcggcaatgaccgcgttagtaaatactcgtcaaaatgtttcccagtttggatcttgttcagcaattcgcagtcgtggctgagccggtggttgctcactggcaggacgggatggtgtttgcggtttattggtgagtgggctggctgccagacggaacgcggaaactgcttgcgttaaacgactcgcctgttcttccagcgcagcggcggcggcagctgattcctgcaccagcgatgcgttctgttgcgtgacgcgatccatttccgaaaccgccaatgcgacttgatcgatgccacggctctgttcatccgatgccgatgcaatctcgcccataatgtcagtcacgcgagtgacagcattgacgatattgttcattgtttccccggcgctttcgaccagcaccgaaccggtatcaacgcgtgagacggagtcttcaatgagggctttgatctcttttgccgcctgggcgctgcgactggcaagattacgcacttcacccgccaccacggcaaaaccacggccctgttcacccgcacgcgcggcttcaaccgcggcattcagcgcgaggatattagtctggaaggcaataccgtcgataacgctgataatgtcggcaattttcttcgaactatcggcgatctcatgcatcgttttcactacgccatccaccactttgccgccgtgctgggcggtgtcggaggcactttgcgccagttgcgaggcctggcgggcgttatcggcgttttgcttcactgtcgcggtgagctgctccatgctggcggcagtttcttccagcgcggatgcctgctgttcagtacgggaggaaagatcggtgttgcccgccgcaatttcacgggtaccggcatagatggcatctgaaccttcgcggacatgagtgacggtgtcagtcaaagagcgttgcatatgtgaaacgctctgcgccaggtcgcccatttcactgcgcccgtcaatggtcagggtattcgccaggttaccaccggcgatttcgcgaatgtgagcaataatttttgccagcggagtaagcaacatacggcgaatgccgtaccacgccaccagcagaatcaataccaccaccagcgcgataaccgccagttgccactgggcaaatcggtaatcatctgcgttgtcagtgacgatatcgcgatacagtttttcactgctgagggcgtactgagcaaacgcttcgcccattgcattttgcattccctgggttggctgagcgaaataagctccagtattgccataatctagataatcaatcagttcagttaacgctgtgtaatagtttttatatttttcatcaatattacgactggtagcgaccatttcaggtaacggtgccatgcttttgaattttttataatgcgtcgctgcctgcgccaatgttttcctggcgctatcgagcaattcaactttggcgttactttgttgattggaggaatccatcatcatccgtaccgctgaacgactcaggttaatgcgcgtttgcagcattaaatcccaggttgacgtcagctcgccctgctgttcccgtaattgattggaaaccacaaagctcttctggctatggtgaagggaagaaaaaaacagactgccggaaataagctgtaacagtgcgaatacccccagcaccattaccaacagcgtgactacgcggatacggttaatcataaggcaccttcctgaaaacaagttgatctcgttatcggcaaggaggggggaaactttattgctgatgccacccgccgcgaaattgaaataaaaaacccgatgcgcagatcatcgggttcatttcaattgaggaaatcgggagaattacgccacttctgacgccgcgctatctaacagcgccatctcttcgctgttcagcagtttttcgatgttcaccagaatcaacatccggtcgcccagtgcgcccagtccagtgagatattctgttgaaagcgtcacggcaaattccggtgccggacgaatttgctccgccgtcaatgaaagcacgtctgagacgccgtcaaccacgatgccgaccacccgctgtccgagattcaggacgataactaccgtgttgtcgttatagtccacatccacctggctgaacttaattcgtaagtcaacaatcggcacaataacgccgcgcagattcgtgacgcctttgataaacgctggcgtgttcgcaatccgtgttacctgatcgtagccacggatctcctgcactttcaggatatcaataccgtactcttcatcaccaagggtaaataccagaaattcctggcctgacggctcgctggccagctttgttacattcgtcataccggtcatattgttacctttttactcattcaggcggcggtgttcgccatacgttgttcgcggtttatcgcctgcaaggcggagacatcaacaatcagtgccacgctgccgtcgccaagaatggtcgcagcagaaatgccggggactttgcgatagttactttcaaggtttttaaccacaacctggtgttgaccaattaattgatccaccagcaaggcgtagcggcgaccgccactttgtaagatcaccacaattccctgggtggcttcggttttcgcgcccgcgacgttgaacactttccacagttcgacgatgggcagatattcaccccgcacttccagcacccgctcgccgccggccagtggatggagatcggcttcacggggttgcagtgattccataacagcattcagcggcagaatgaaaacttcatccgcaacgcgtacggacatgccgtcgaggatggccagcgtcagcggcagtaaaatgcggatcgtagtgccagtaccctgcttcgactggatttcgacatgaccgcccatcttctggatattacgtttaacgacgtccatgccgacgccgcgcccggagacgtcggtgacctgctctgccgtggagaagccaggtgcaaatatcagcatcgcgacttcgtcgtcgctcatgttttcgctgacagtcaaaccttgcgaggccgcttttgccagaattcgctcacggtttagccccgccccatcgtcggtcacttcaatgcaaatgttgccgccctgatgttcggcagacagaattaaatttccgacgctgtttttacctgcggcgagccgtttttctggcagttcaataccgtgatcgaggctattgcgtaccaggtgggtcagcgggtcgataatgcgttctatcaggcttttgtcgagttcagtagaactgcccaccagcgtcagttctacctgcttgccgagttttcccgccagatcacgcaccagccggggatagcgactaaaaacatattccatcggcatcatgcgaatcgacatcactgattcctgcaaatcacgggcgttacgttgtaactgccccatgctggttatcaaatcaccatgattaaccgggtccagttcgctggaacgctgggcaagcatggactgggtgataaccagctcgccgacgaggttaattaattgatcaaccttttctaccgctacacggatgctggtggattcattgctgcgcgtcgttttttcccgctccacgcggccggttggcgcttgttcggctgccagtttaagcactggtggggtggatatttttggcgagacttctactgtttcaaaggtaatctgatcggcttcaatcacaaaacagagtaccgctgtgatgtcatcttcggcgatgtcgcccggtaatattgccgagagcgaatccgcccctttcaccacgtcagttaacgttgtcagatgtcccagttcttcttccagcaggtcgacttccccggccttcaggcgcgaaaggataattcgtcgcggcgactgactgcgactctgctcatcttgcggttcacttttggcaaccacacttaatcgggtcactgcggatggcgtttcgcctttcgcttctaatgccagttgacgcaaggcctggcagatataatcgaagctggcggcatccggctcttgcgactgtttataagcgtcgagctgttcttgcatgatgtccttcgtttccaaaaacagattgataatgtcggtgttgagttgcatctcacctcgtctggcttcatcgagcaggttttccatcagatgcgtggtttcctgcaaaacgctgaagccaaaagttcctgcccctcctttgatcgagtgggcagcccgaaagatggcattcaattgttcggcatctggcgcttccggctgcaaaaccagcaaatgctgctccatgtcagccaacagttcgtccgcttcatcaaaaaatgtctgataaaaatcgcttatatccatgctcacgctgtcacctcggttcggctgatggcattgtgggaacactgacctgtggtgcaacctcaggtttttccagggcgcttactggctcattctggctttcggcgttttcatgcaaaatggcctgttcggcttgtttgttcagtaccagcaggctgatgcgacggttgacggcatcatcaggtccgcgatcgcttaagcgcatcgttgccgccatgccgacgacacgtaacactttgccgctatccaaccctccgaccatcagttcgcggcgggatgcattggcccgatcggcagaaagctcccagttgctatatcctttctcaccgctggcgtaggggaaatcatcggtatgacctgaaaggctaatacggttgggaataccgttcagtacaggcgcaatggcgcgcagaatgtcgcgcatatagggttcgacatcggcactgccggttctaaacatcgggcgattctggctatcgatgatctgaatacgtagaccttcctggaccagatcgattttgagatggggacgtaacgcccgcagtttcggatcggactctatcaactggtcgagatcaccccgcaatttccgcaatcgactttgctccatgcgttttttcagctcttcgatgttcggctgcttattcacttccccctggctttgggtgtaatcatcaccaccgccgggaattgggctttcactattagaaatgcgatcgccgcccgtaaccgcagtcgccagtggagtccggaagtactccgcaatctgaatcagctcttttgggctggagatggagatcagccacatcaccagaaaaaaggccatcatcgcagtcataaagtcggcataagcaatcttccacgatccatgtgctgccccgtggcttttggctttgcgtcgtttgacgacaataatcggatgcgcttgattcttcatgcttcctcggttgtcgtctgttgttgcggatttttcaccgcacgcacatgctcttccagttcaataaacgacggacgttcgctggaatagagcgttttgcgaccaaactcaacggcgataggcggtgcgtaaccgttcagattagaaagcagagtgactttgacgcactgcatcattttgctggtttcggcgcttttctgacgtaaaacagtcgctaatggggaaataaatccgtaagccaataaaatgccgaggaaagtccccaccatcgcatgtgcgataagcgcacccagctcggcggcaggacgatcggctgaacctaacgcgtgaacgacccccattacagccgcaacaataccaaacgccggaagtgagtccccgaccagcgccagactgttcgccgggacttctgcctcgctttcgtgcgtctcaatctcttcatccatcagagcttcgatttcgaaggtgttcatgtgaccgctgataatcaggcgcagataatcgacgataaaatcaagcatgacgctatccgcgaggatgcgtgggtagctggcgaagatctcgctctcacggggattttcaatatcacgttccagcgaaaacatccccatctgccgcgatttcgccatcaaccgataaagcagagccagcagatccatatacattgctttggtgtatttggagcgacgaaacagcaacggcagcgccttcagcgtgcctttaatcgctttgccattattgccgacgataaacgacccaatccctgcaccggcaataatcaccagttcagcgggttgatagagtgctccaaggcttccaccggtcatcaaataaccgccgaaaactgtaccgagaacaaccaggtaacctaataagataagcacgacatcatccttccactgttgaccatgacaggatgttcagtcgtcaggcgttaacgcgcgattggggcaaaaaaaagcagcggtacgtcgttaccgctgctggaatgttgcgcctcaccgtatcagttaaacagcctgtactctctgttcatccagcagttgtgggataatatcggcaggattctgggaaagtttacgtctttttactgcccgggatggcggttgacataagctgcaggcaaagctgccaacaggctggtgagcgtgggtaataaaattgccgccgcagcagttgcagctggaaagttgcagtaatccactttcaacaaaccgcaccaatgtccaggcacgggttaatgccagcagtggtccttcttctgcttgtgggcactgttcaaggtataaacggtaggctttgatcaccgcatcgacgccattacacaaaccggttttcagtaaaaactgccatgcattacagaacatcgaagcatgaacgttttgttcccaggtcataaaccagtcggttgagaatggcagcatgcctttcggcggtgggcttccgcgcagttctttataaagttttatcaggcgtccgcgacttaactgtgtttcgctttccagcatctgcaaacgagcgcccagggtgatcaattccattgccagctgaatatcccgcgcttcctgaacaatgcttttttcactcatgatcaggcccttttcttgcgcagcgcttcttcaggctgattaacatcattcagcaagcgtgttgagagcatgatgccggtatgaatttgctggagatcgtcaacgcgggaatcttgcgtcaactgagtaatcgtctggtggctgtcaaaacggaagtgacaaaccagttgattggtttctgccagcttaaccatttgcggaagagtcagtgccgctaacgttgtcgccatttcttcatttatgccgagacgaaacatagcggacgctttgtcctgaacaatcaaacgctgtgcaagtagtaaatatgacaagttgatgtcataaatgtgtttcagcaactcggaggtatgcattattcccacccagaataaccaactttatttttatgcggtttcaccgcaccccgtgatgtcgccgggaagccccggtaaaaaataattagcattagaatagttgcgataagctgcaataagcagaaccacctttttggtttaatatgtccttacaaatagaaatgggtctttacacttatctaagatttttcctaaatcgacgcaactgtactcgtcactacacgcacatacaacggaggggggctgcgattttcaataatgcgtgatgcagatcacacaaaacactcaattacttaacataaatgtataagtcatacttttgttttgggtgtatttcaatctgttaaaaagtttttcgctacgctagcaagcaaaaatgaaacaggaataatcgaaatgggatgttgcgcacagtcaaaataactcaccgtaaataatcatctgctataaataatcactttcatgcaataccagataagctatttttaaacagacacttaccgcacaacaaactaattaaatacaaagaaaggcaacaatcaacttaatgttaatgaaatgttttacatatattaaccacttgtttaatgcggagaatcagtacactattttcttataattacatttgaaattatatgatcaccgggagtgattgattaattatctttactaataatcagactaatatttacctgtttgaccgagttgggattgcgtcgtttctccattaggagtaaagctttaatgtcacctgaagttcacagaataaggaacaggttatgagctatagcaatattcttgtcgctgttgcggttacaccggaaagtcagcaactgctggcaaaagcggtatctatcgccaggccagtaaagggacacatcagtttaattactctcgcttccgacccggaaatgtacaatcaattagctgcgccgatgcttgaagatttacgcagcgtgatgcatgaagaaacgcaaagctttcttgataagttaattcaggatgcggggtatcccgttgacaagacgtttattgcctacggtgagttaagcgaacatattctggaagtatgtcacaagcatcatttcgatttggtgatttgcggtaatcacaatcacagtttcttttcgcgagcatcctgctcggcgaaaagagttattgcctcaagtgaggtcgatgtgctgttagttccacttacgggagattaaccgctcctacgcaagctttggaaaggtagcaactttatcgcgctgctggctttccgcgcttcgcggaactatctgctttaggtcgctaatgaagcactcctgccagtggttaatatcgtttttcacgataacgtccagcatttctgcatgacgggaaatacgttccgccagcgacatagtcaatgcacgatccagcgcagctgcaacttcgtcacgatcgtaggggttaacaattaacgccgacgttaactcgtttgccgctcccgcaaattgcgaaagaacaagaacgcccggattggctgggtcctgagcagcaacatactcttttgctaccaggttcatcccgtcacgcagtggcgtcactaagcccacgtcagagtagcggaatattttcatcagtaatttacggtcaaaatgctgattcaaataataaagcggcgtccagcctaattgcccgtatttaccattaattcgtccagcttcattttcgagctgatgacgaatatcctgataggcttgcacatcaccacgcgacgttggtgcaatctgggtataacgaattttaccatgatgctgcggatatttttccagcaacgcttcataggcgagaaaacgctctggcaaacctttggaataatccagccgttcgacagaaaagatattttgtacgtttttcagttccgctttaagttgcgccagttttggcggcagtggcccggcagcctgtttggctatttctttcggttcaatgccgatcgggtagacttctgttcgaaatgctttgccccaggctgtatggctttttgcgctacgtgtcgtgacgcgggtcaggttagaaagacaatccaggaacgccagacgatcgttttctgtctggaaacccagcaaatcataatcacaaagctgttcaagcaaggtgtcatatgtcggcagcgcgttgaagatttccggtgtcgggaaaggaatatgcagaaagaaaccaatgcgattattcactccccgtttgcgtaattcatgcgcaaatggcaacaggtgataatcgtggatccagataatgtcatcgtcttgcaacagcggcagtaatttatctgccagcaacgcatttacgcgtagatagccgtcccaggcaggacgctgaaattgcaccagatcgagccgataatgaaaagcgggccagagaacggcattggagaattggttgtagtattcgtcaaggtcctgttcgctgaggttaaaagaggcccacgtaatgttaccttttttcaccttttttagcggctgatcctcattccctgtttcaccactccagccaaaccacagtccgcctgcggctttcagtgcccccagtatgccaacggcaaggccaccggcactggcggcgtgctcgtctggtggtgcaatccggttagatactacgactaaacgactcatagtcatcactcctgttattttctcttttttgttgtaatgcggtggttatcatttcaagccagctccagacatccggcacacccgccagtcgccatgatgcctgagttgcacctgtgccaatttttactgacattccgcccagtcggttaacgactgcgaagccagattcatcggttaaatcatcgcccagaaatacgggcgttcgcccgataaagggagcttcctgcataaaagctgcaattgcctcacctttactggtacctctcggtttgatctcgacaacacactttccctgctgtaacgccatttgtggccagatctgagtaatacgttgcgctaatgtcattaatgcgtcttcatgctgcggagcctgacgataatgcagcgcaaaagccatccctttcgcctccagctccgcgccgggatactgagcgatgactgtatgcagttgcacgctaatatcacgcgcaatcgcatccggcagatgaacgatatgtgttttaccattgatgtcacggcgctccgccccatgcacgcccgctaacgggaagcgataaggttttgccagtgcgtcaagctccaccattgagcgccctgatatcaatgccaatgcaccatcacttgcggttgccagtagctgtagtccttgcagaatattgtcaggcacgacgacctgatcgggatgcggtttgatttccgccagcgttccatcaagatcaaaaaaccaggcatatttcgcggatagttcaggggtttcggttaacggttctgtcacccggttctcctccttctcttttcttattgtgttgcgcagaacgcgctttacagacatgtaagtatagacagtgtgacgggggtcgccatttgcaacgaagaacagccaaccgttatggcggttggctatggtgggaaaaaacgctaaattgttgcagaaaaaagcatcagacagtgcgtttcgctttttgcttgtaacggtcgaagatcaccgctgccagcaggattaagccgcgaaccacgtactgcgcgaaaggagaaatattaagcaggttcatggcgttttccacggtgcctaaaattaagatacccgccaccacatatgagatttttccgatgccacctttcagagaaacgccacctaaaacgcaggcggagataacaatcagctcataaccaatcgacgtcattggctgcccactggtcatacgtgaagccagaataattccggctatcgctgataccaggcctgagagaacaaagataataattttggtgcgaacaaccggtacacccgccagacgcgcggcctcttcgttcccgccaatcgccagggtgttacgaccaaaggtggttttattcagcagcaaaccaaagataatcagacacgcgacggtgagccagattggcgcaggcagaccgaaccagttggcgtaaccaagggcaaagaagctttcatcttcgataccgaccgctttaccgtctgaaatgatgtacgccagacctcgaacaatctgcatcgttgccaatgtcgtgatcagagcatttattttcagtttggcgataacaaagccattgaccaggccacagagaacgcccagcaacaaccccgctgccacgccaatccacaggctttcagtcaggttaataaccaccgccgtggtgacacccgcacaggcaattacggaggcgacagaaaggtcaaagtcaccggaagcgaggcagaacaacatgccacaagccaccatccccgacatggaaattgccaggcccaaccctttcatattaatgaaggtggcaaaatttgggacaaaaatggcacaggcgataaagagcaccgcaaacaccaccagcatgccgtactgatcccagatacgcccgaagctgaatgacgacttaggtgcgccagaccccgatgtagaaacagaagacatcatactctccttactcaggcaacagcctggctgactttaggcatcgcaaggctcagtgcctgacgctcatctgcctgctcgtgtaacaattcaccggcgatttcaccttcccgcatcaccacaatccggtcggcaacgccgaggacttcaggtaagtcgctggaggcaaacagcaccgccacgccctgcgccgccagcgcataaattacgttatatatttcgtgcttagcgccaacatcaatgccgcgcgtaggttcatccagcaaaatgaccttcatctcttccgataaccagcggcccagaatggctttttgctgatttccgcctgagagattcatgatcagttgctccgcgcccggcgttttgatgttgagcgaacgaatgtggtgatcggcattgttttcttcccaaccgttgttgattacacaaccgccgagcacatgtttacgtctggcactgatgttgatattgtcgcgaacggagtgcacgggaataatgccttccgctttgcgatcttccgggcagagcatcatgcctgcggcaatggcgtggctcggtttacgaatatcgatcggctgttggtcgatataaacctgaccggcggtgatttgcgtcccgccaaacatgcctttcattaattcgctacgccccgcccctaccagaccaaacagcccaacaatttcaccactgcgaaccgccagacttattggcgtacgcacgcctggtgctttcacagcatcaagacgtaggcgctcctcgccataactacgcggttgccagccgtagatatcgccaatgtcgcgcccgaccatcgcctgcaccagcgcgtcgtggtcaacctgctgcatatcggtaaaggttttgacataacgtccatctttaaagacagtaatggcatcgctgagggcaaatatttcttccatacggtgagaaacgtataagattacccgcccctcttttcgcagttcacgaataacgcggaaaagattgtcgatttcacgggcagagagggagctggttggctcatcaaaggcgataattttggcgttacgcgccagcgctttggcgatttcaaccatctgccactgaccaatggagagatatttcagcggcgtgtccgggtcaatatccataccaagatgtttaagttgtaaacccgcctcataattcagcaatgagcgattcacaatgccgcctttatgcggcagctggccgagatagatgttttccgcgacggtcatttccggcacgagatgcagttcctggtaaataatcgccacgcccgcgttaagtgctgcggtcgtgtcggaaaaggacatttcctgcccattaatcactacagaacccgtggttggcgcatagttgccgctgaggatttttaagagagttgattttcctgcgccattttcacccatcaacgcatgaacctgaccggcatagcagtcaaaactaatatccgtcagcgccttaacgccgggaaacgttttaccgatgccgcgaaatgagagatacggggtagactgttgcataacgtctccgtgaatcactggtcgttcacaccccctctgcatcatgcagaggggaatttttccggcaaattacttaccgcctaaaccttttttctccagttcttctttaaagttgtcacgcgtgatcagtaccacgtcggtaacttcggtaaattttggcggttcaacgtcttttgctacccagttgtaaagcatttcgctggatttatagccatgtacgtccgggcttggcagcagggaaccgtagaagccggttgcctgtgctttagacagttcgctcaccgcatccacaccgttaatgccaatgccgatgatatcggccgctttaaagccctgaccttccgtcgcgcgtacgccgcccagcacggtgctgtcgttcataccgacgatcagccaatgtttaacttccggatgttgaaccagcattgagttggcagcgtcaaatgcccccgggatgtcgttagatttggtaggtacctgataaatttgtttttccgggaatccggccgctttcagcgcatccatagatcccgtagtacggcggcgggcggtatccagttcgttggcggtaatcgccatcaccgcgctttctttgacatcccagccacgtttctgcatctctttatacagttcctggccctgacgttcgccaattttagtcgccgccatcatcaccagcggaacggtatccattggcttacctttggcgttaacaaactggtcatccacggcaatgactttcatatcgtagccacgcgctttcgcgacgatggcagagccgagtttggggtccggagtacaaataacgaaaccttttgcgccactggcagccaggctgtcgatcgcgttcaatgttttttcgccatccggcacggcaatcttaataacctcaaaccctaaatccttcccggctttatcggcaaacttccattcggtctggaaccacggctcttccggttgcttcaccagaaaaccgagcttcaggttctccgccatagcggattgtgacataacggctgccagaccaatggctgccagggctttagtaaatttgtgcatggttctctccagctttagtgtcgttttgtgtagggcaaaaacgaatgacattcgttaaattaatcggaaaacaaagcattaccttttaactaaaagataagtgactgtgttgacatagttttagcgagaaattaattctccataggagagcaatatcacatcgcagaattacagtgagaacgtgcataaatttagcgggaaaagacataagggaaagccaatttgtcagacaaattgtcgaatgcacagcagattaatccataagattagcctggaaatccttgttgtctttggtacccatgcgggatgtcttctttttaaccagtcaataggccgcattacctggcgttgagtttttgaaatggtgtaataaccgcaactcaaagatgtggaaaatgcacgtcattcatttcgtcattaattatcactgtgctcattaattaacagaacacgtataatgagagccatctcgcaaaaatgaaaaaacgttttataaaatcatcacttcatcatgaattcaaattcattgattaatatcaacaagatacaaaaagcactatcattaaaattcattgcagttacattgatttcatcaatgaaatgtaaaaatatataaacttgatgatttaagcattttcttatacccgttcagacgttattcttatttcagatcatcgtcagaattgactccacgatcacatttcggaccggcagaaaggaattattctgcaaacagtaattatggtgttttgatttatcttgcacctctccacttctggatataaggatattaggtatggcaaccgctggaatgcttctcaaactcaactctcaaatgaaccgcgagttttacgcatccaatctctaccttcacctgagtaactggtgttctgaacagagtctgaacggcaccgccactttccttcgcgcccaggcacagagtaatgtgacccaaatgatgcgcatgtttaactttatgaagagtgtcggcgctacccccatcgttaaagccattgatgttcccggtgaaaaactgaactctctggaagaactgttccaaaaaacgatggaagaatacgagcaacgttctagtacgttggcacagttagccgatgaagcgaaagaactgaatgatgattcaaccgtcaatttcctgcgcgatctggaaaaagaacagcagcatgatggtctgttgctgcaaaccattcttgatgaagtgcgcagtgcgaaacttgcgggtatgtgccctgtgcagaccgaccaacatgttctgaatgtcgtgtcacaccagctgcattgatcatcatcggcgctaatgcattgcgccgatgaaggttttgagaaaccgctgcctcatctgtttgaagcagcggtttttttaatgggattcaccctgtggggtaaacttgagttcaataagcgcgatggctttttggattgcccgcatggtgaccgggtctgcggcggcgggatggttagtaaagtcgatattcttcagctgactggacattttttcacgaacttcaacgggcgcgattacatcgagaacatccagaatttgtttgataaccaactggcaagcaaccacatcagaaaccaattcctgatcggcattcagcggctgggacatcgtaaactcctgatagcattttgaaagccgttatagtagcgacttcacatcttcagcgatagtcacatccaccgtcatcaggacacaaaaaaacctgccggagcaggttttttgttatcggaacatattgcctggcggtacgtctttgaacgtcttgcaatagttattgaacatacttttcaggattttgcgcagtttcatcgcggcactccgaccatttgttatacaggtgttattgtctttgcgcttataatatgacaaccatcacaaaaatcaatctttatgtgatacaaatcacataaatacccctttaatgttataaaaatgataatcaaaaaacagcccccctatttctgacacctacagatggcaagaaatagcgcctgccaggcgtcttttccggccattgtcgcagcactgtaacgcgtaaaatagtgctttctcttactcttctggctggaccatgagacttctgattctgactctttcattaataacgctggcggggtgtacggttactcgccaagcccatgtgagcgaagttgacgcggcaacaggtattgtacggttagtttatgaccaggcttttttgcagcatgcccataccgatcgttatgtcagtcgcgggatcgccgatcgcgcatgccagcaggaaggctatacccacgcggtcccctttggtcagccagtaggcaactgtagcctttttgcgggttccttatgtttgaatacggaattcactttgtcatatcagtgccatcattccgccttccctgtctttctctaaatattttaatcagcgaggggatcttcgctgattaaagaaatagcggtaatgcgttttattcccattcgtatttttaataattgaagtttatattttaccttttgcaaataataaaataacaaattatagtgacgccacagcaacaaatataacctttgtggagcactatcatgctgaaaccagaaatgattgaaaaacttaatgagcagatgaacctggaactgtactcttcactgctttatcagcaaatgagcgcctggtgcagctatcataccttcgaaggtgctgccgcgttcctgcgccgtcacgcccaggaagagatgacgcatatgcagcgtctgtttgattacctgactgataccggcaatttaccgcgtattaataccgttgaatctccgtttgctgaatattcctcacttgatgaattattccaggaaacctataaacacgaacaattaatcacccagaaaattaacgaactggctcatgctgcaatgaccaatcaggactacccaacatttaatttcctgcaatggtatgtttctgagcagcatgaagaagagaaactgttcaaatcgattattgataaattaagcctggcaggcaaaagcggcgaaggtctgtattttatcgacaaagaactctctaccctcgacacacaaaactaatgctctccggcggcaggtttactgccgccgtttcaaatcagtgacggcaaatcttactctgatcggtcgaaaaaccgtctttcgaaggtataaatttgccttttgctgccagaaacgctaccagctctcccgctgtcatcccttctgccgagcaggtgtgaaaacgtgcctgttcaccaaaacgcgctttaatcgcagcttccagactggcatgcgtatattgctcgcctgattcaatcatcatatttaacacttcatgaccgtgaatagagtccatcgtccctcctcaaaaaaagcctagcgtagcgattgccgcttatgaagactttgcgccagcgcaggactgaatgctttttattgtacatttatatttacaccatatgtaacgtcggtttgacgaagcagccgttatgccttaacctgcgccgcagatatcactcataaagatcgtcaggacagaagaaagcgtgaaaaacagaaccctgggaagtgtttttatcgtggcgggaaccacaattggcgcaggcatgctggcaatgccgctggctgcggccggtgttggttttagcgttacgttaatcttgttgattgggctttgggcgttgatgtgctacacggcgctattactgctggaggtgtaccagcatgttccggcagataccggtctgggcacgctggcaaaacgctatctgggacgctacggtcaatggctgacgggcttcagtatgatgttcttaatgtatgctctgactgcggcatacatcagcggtgccggtgaattgttggcctccagcatcagcgactggacaggtatttctatgtcggcaaccgctggcgtgctgttgttcacttttgttgccggtggcgtggtttgtgtcggaacttcactggtcgatttatttaaccgttttctgttcagcgccaagattatttttctggtggtaatgctggtactactgctgccgcatattcacaaagtgaatcttttaaccctgccgttgcaacaggggctggctctgtctgcaatcccggtgatttttacgtcgtttggttttcacggtagcgtgccgagtattgtcagctatatggatggcaacattcgtaagctacgctgggtgtttataatcggtagtgcgatccccctggtggcatatattttctggcaggtggcgacgcttggcagcattgattcaacaacctttatgggattgctggctaatcatgctggattaaacgggctgttacaggcgttacgcgaaatggtggcctctccgcatgttgagctggcagtgcatttatttgctgatttagccctcgccacgtcatttctcggcgttgcgttaggcttatttgattatctggctgatttatttcagcgttcaaataccgttggtggacggttgcaaactggtgcaattacgtttctgccgccgttggcgtttgcactgttttatccacgaggatttgtgatggcgctgggttacgccggtgtggcgctggcggtactggcattgattatcccttcgctgttgacctggcaaagcagaaagcacaatcctcaggcgggttaccgggtcaaaggtggtcgtccggcgctggtggtggtgtttctctgtggtattgctgtgattggcgtgcaatttttgattgcggcagggttgttaccagaagtggggtgatcagatagcctcaaattccttattgggtgccagaattaacgctgacacccaatttggcctcttaatgcaggcagcactgcttaaatttcttaccactaccgcacgggcaaggatcgttacgccccggtttctcttctgctttgatcggttgctgaacagctttttcctgcggatgcgccatccagtacgcatgtagatcaagcgccgccagtcgaatggcatctacgctctcttcaaacgcttctggcgacatcttttctacccgctcgaagttttcctcagtaccgtgcagcgcaatcgcctccagcgctggttttaacgaatcgggcaacgttgaccagtcagaaagtgccacgccccgcatatagccaaagcaccactcctcaacaatcgtcagctcgctgccatcaacttctcgcaagccgaataacggctcaaactgctccgggaattcgttcagacgctctgcggtatcggccatatgttgaaaagccagattcataaagcgcgtcatctctttctctgacgcccagcgcggcacatagtcagccccaccccacacggcaaccagccactgttccggttcaatctcttgcggagaactcaacaccgccgtcaataaaccgtccagctccgccacatcaaggatggcgtggtcagtgttgtatttggtcagaatatcgtccagccattccaactcactttcgtttaacggtcccgttttcatacgcttttccttgtggatctcaactcgccagcacctatcttacatgccggtccgtatcagagatactttttgagtggctttgctggtgattaaaaattaaggagggtgtaacgacaagttgcaggcacaaaaaaaccacccgaaggtggtttcacgacactgcttattgctttgattttattcttatctttcccatggtacccggagcgggacttgaacccgcacagcgcgaacgccgagggattttaaatcccttgtgtctaccgattccaccatccgggctcgggaagaaagtggaggcgcgttccggagtcgaaccggactagacggatttgcaatccgctacataaccgctttgttaacgcgccaaattcttcaggcctttcagccagacatccgcttgacgccgatgtcttttaaactggagcgggaaacgagactcgaactcgcgaccccgaccttggcaaggtcgtgctctaccaactgagctattcccgcattcatcaagcaatcagttaatcacttgattttattatcgtctggcaatcagtgccgccgttcgatgcgttgcattctacttacctggcgcgatgagtcaacgatatttttcaccacttttgatcgtttgctgaaaattacgccgaaacgatcactgatcaagcaaatctgcacgcgcagcgctcaaatattgcaacattgaccacagagtcagtaccgcagccacaaagaaaagtgcaataccggcgtactcaacccaaatgttcggacgccacagcagccatgccaacgccaccatctgggcagtggttttcactttcccaatccaggagacggccacgctactgcgtttacccaactccgccatccattcgcgtagcgcagaaataataatttcacgggcgatcatcgttgccgccggtaatgtcacccaccagctgtgataatgctcggttaccagcaccatggcgatagccacgagaactttatctgccacagggtcaaggaaagcaccaaaccgggtactctggttccagcggcgtgccagaaaaccatcgaaccagtcagtcaccgccgcgacgcagaaaatgagcgcggcggcaaacggcgaccaggtgacaggcagataaaagaccaatacaaagaatgggataaggatgacacggaacagtgtaagcaacgtagggatattaaattgcataatgacgggtaactatctgttgtcagtaagattacccctatgttgctacagagacatcaatgtttcaacgaccagaagatcttttctgccagaccttgcgaaatacccggcacttttgcaatttcctcgacgctggcgttacgtaaaccttgcaaaccgcccatatatttcaacaacatttgccgacgttttggcccgacgccttcaatggtttccagggaactggtatttttgaccttcgcccgttttttacggtgcccgccaatcgcgtgatcatgtgattcatcgcgaatatgctggataacatgcagcgcgggtgaatctggcggcaaactaaatccctcaccttccggctcaaagaacagcgtttccagtccagccttacgatctgctcctttggcaacgccaagtagcagcggatgatttttatcccatgagacatccagttcggcgaagacatttttcgcctgcgcaagctggcctttgccgccgtcgataaggatcacatccgggatcttactgtcgtcaatggctttaccataacgccgacgcagcacctgattcatcgccgcataatcatcgcccggcgtgatgcctgtaatgttatagcgccgatactccgcacgcagcgggccgttagcatcaaacaccacacaggaagcgacggtttgttcgcccatggtatggctgatgtcaaagcactccatccgcttcacttccggcaatttcaacacgctggcaagcgcggtcagtcgctggtgaacggtagattgctgcgaaagtttgctggttaaggccgtcgccgcattggtgcgcgcgagtttcagataacgcgccctatcgccgcgaggtttggtttgaacattaatcttgcgtcccgccagttctgaaagggaatcggcgagcagcgttttatcgctaagattaaaatcgagcaggatctcacccggtaaggtgcgcatctggctgccttgtaaatagaactggcctacgaaggtttctaccacctcgctcagttccgtaccgccaggcactttcgggaaatagctgcggctgccgagcactttgccctgacgaatgaacaatacgtggacacaagccatgcccgcatcgaacgccacaccaataacgtcgaggtcgtcgccggtattggaaacgaattgtttttcggtgacgcgtcgcaccgcctgaatttggtcgcgaatacgtgcagcttcttcaaactccagattctggctggcagtttccatacgactaatgagttgcgtaagcacctgatcatctttgccagacaaaaacaggcgcacatactcgacctgctgagcgtattcttcttcactcaccagtccttcaacgcacggtcccagacagcgccctatctggtattgcagacacggacgcgagcgattgcgataaacactattttcgcactggcgaatggggaaaatcttttgcagtagcgccagtgtttcacgtacggcatagccattcgggaacgggccgaaatattcacctttggcatgcttcgcaccacgatgcatcgccagacgcgggtgggtatcaccactcaggaagataaaaggatatgatttatcatcgcgtagcaaaacgttgtaacgcggctgatagagtttgatgtagttgtgttccagcaacagcgcttcggtttctgtgtgagtaaccgttacatcaatttgctggatctgggcgaccagcgcttcggttttgcgcgaagcgaggttgctacggaaatagctggaaagccgttttttcaggtctttcgctttgccgacatagataaccgtaccaccagcatcgtacatgcgataaacgcctggctggctggttacggtttttaaaaacgcttttgcgtcaaactgatcactcactgacttgataatgtctccgcattacacagaccatggcgaattgccaggtgagtcagctcaacatcgccatgaatgtttagtttactgaacatacgatagcggtagctgttcaccgttttcggactgagattgagctgttctgagatctcattgaccttctggcccttggtgatcatcagcataatctgcaattcacgttcagacaaactggcaaatgggctttctgttttttctggttcgatctggcttaacgccatttgttgagcgatgtcagaagcaatgtaacgctgccctgaatagacagaacgaatcgcactcacgacttcctgcggagccgcgcctttgctgaggtagcccgcagcaccggcctgcatgactttcgctggtaaagggttttctgtatggacggtaagcatgatgattttgacatcagctgtggaacgcgcgattttacgcgtcgcctcaagaccgccaatgcccggcatactcatgtccattagcaccacgtcaacggcatttgtccggcaccacttaacggcgtcttcaccgcacgatgcctcaccgacgacttttataccctttatatcttccagaatgcgtcgtatccctgcgcgcaccagttcgtggtcatcaacaagtagaacgttgatcaaaggaatatctccagaaatagggataacgctactgatagttagtcattcgtatattagcggtttttattgcaactttgaaacgttaaaaatggtgggtattcgatttttctctcgtttttgtcaattcgattgtccacagttatggtcacgcccgtcaccaacggcttaccggatcgtttcacagtaagccctacgatgaaatgtgacaaaaattgactttattcagcaaaaatgaaaatcagcccgctgaatatgtaacattaattaacccgaacaatacgggcaaaaaacattcatgataaaaatatttattggtcattatattaacgtattttatagcactgccgatatcacgctcaaaaaacaaccactgctatttttagcaaagcttatggtatactccgccgccttaacatttttcaccgcaaattttcattgcaacatgacgaggaaaataaatgagtacgcctgatttttctactgccgagaataatcaagaactggcaaatgaagtctcctgcctgaaagcgatgctgacgctgatgctgcaggcgatgggacaagctgacgcgggccgcgtgatgttaaagatggaaaaacagcttgcgctgatcgaagacgaaacccaggctgcagtattttccaaaacggttaagcaaattaaacaagcctaccgtcagtaatataaaaccggctgatagcgtgcctttcagccggtttttgcatctggcacgcaggacagaaaagagatcaaattaagccagtagcggccgcgtaacaggcaacctgggtcttatttggtgcattaatttttttctgcatgtttttctggtggaaattgaccgtattctcagagattgacaaaatcatcgctatctctgctgatgttttcccttccgccgtccacctcagaatttctttttcgcgcttgctgaaattcatctctggcgtcatcactatttcatcatttaaacgcatcagagccatcagactttcgcgcaccagtaactgcatttttaattgcagttcatcactaagaatgggtatttcgcgcgcgctgcaacgggaaaaggacaaaaagcccagcgcccggtttggcagcattaaatactgagtgacaccgcggcgtaaaccatgtgcgcgcgcggcttcccataacggctgtgcttcgctgaataagtcatcattccacattaaatggccctgactaaagttttcagggttcagcaccggatcaattgcgagaaagttttttgcctgataataactaacccacgcctcagggtaattggtgtaaaaagccactttaggtcgagtgaatggtaccgggtggcggacacataacgaatagtaatcgtactccagctgctgagcctgaagctcaatttcatggtagacctcttctgcggtctccatcctctgaaaacgcaacagcatcgtgcgacgccagctgaaaaaatccttatcctgcatagtaaaccgcaacgcccctgagagtgagtatcatttataatgataattcaaactatcacataaataagatttatatataatttatattattcaggcaatgaattacttttgcaagccatcgcattctcttatgttattaatgagttatgctgatttgttaagcagttttatcaggcttgaaatggcgtccagccccgacaggtgaatcgtcggggctgattttttcttattattgcagcagaaacttctcgaggaactggcgggtgcgaggctgctcggggtcggcaaataacgcttttgcggccccctgctcgactatccgcccctggtccataaagatcgcccggtccgcaacatcccgggcaaagctcatttcgtgcgtcacaatcaccatcgtgcgcttttcctgcgccagctgacggatggtgttcaggacttcacccaccagctctggatccagcgctgacgttggctcgtcaaacaaaatcacctcaggacgcattgccagcgcacgcgcaatcgcaacacgctgctgttgaccgccagacaaacgacgtggatagctggtttctttacctgccagcccaacttttgccagcagctcgcgagcgcgcgccgtggcctcttctttcggttcacctttgacgatcaccggcccttcaataatgttctccagcaccgtacgatgcggaaacaaattaaagttctggaagacaaacccgacgtgctgacgcaactggcgaatcagagatttttgctgacttaatgaacgtgcagtatcaatagtgatatcgccaacggtgatcgttcccgcttcgggttgttccagcagatttatgctgcgtagcaacgtggttttgccggaaccactcggaccgataattgccaccacttcgccaggctttacctcaaggtcgataccgtgcagcaccgtctgaccgtggaattttttcaccaggttcttaacttcaatggcactcattttggttctctctcctggcgattaagttgattctcaaaatggttctgcaacgtcgataacacagtcgccatgatccagtagatgagcgaagccgccagatacatggtgaacacctccagcgtacgcgaggtaatcaactgcgcctgacggaacagctccggcacctggattgtcgcggccagcgacgtatcttttaccaggctaataaagctgttcgacagcggcggcaacgccacacgcgccgcctgtggcaaaatcgcgcgacgcatggtctgccacggcgtcataccaatactggctgccgcttcccactgacctttatcaatagaagaaatggcggcgcgcagcgtttcggcagcataggcggcagtgttcaacgacagaccaatcattgctgacggaatgggatctaattcgataccaaactgcggcaggccgtaatagatcataaacagttgtgcgatgagcggcgtaccacgaaaaatagagatataaaaacgcgccagccagcgcacgggccagattggcgacagacgcatcagcgcgagaataaacccgagcagtaagccaaaaaacatgccgccgatactgagttgcagcgtatacccagcccctttcagcaggaacggcaaggaatcaataaccagttgtatactttcttgcatgagcgtttccggagctaaacgtggggatgataggcgaacagcgcaggcgcaccgccggtatgaataaacagaatcggcccttcatctttgaagcgtttctgactgataccgtcaatcagccccgccatcgcttttccggtatacacaggatcaagcagaatgccttccagccgcgccagcaatttcactgcttccatgccttcgtcgttcggcacgccgtagccaggtgcaaaatagtcatcccagagtaaaatttccgctgatgcggtcagctccagttctttcgcaatcgcctgttgtaggttaaccactttcggcaattgatcggcaacggaacgcgacacggtcacgccaatcagttcgctttcaggcatcaggtgttccagcccaacagccagtccggcgtgagttccggcactgcccgatgcgactaccaccgatgaaatattaaccgccccttcacactgttgcgcgatttccagcgcactctccacataacctagcgcgccaagagcattagaaccgccaaccggaatgacatacgggcgaaagccttgtgcttcgactcgcgtcgccagctcttccagttgggcattgggatcggtcagtgcgtcgcacatttcaatctgggtattgaacagatccagcaacaagcgattgccgttggttaaatagttttctgcggttgtgccaataggattttccagcagcgccacgcagtgcagaccgagtttggcagcgactgcggcagtctgccgcacatggttagactggatcgccccggcagtaatcagcgtatcggcaccttcacgcagagcatctgccgcgagaaattccagcttacgtaatttattgccgcccattgccatgggggtgacgtcatcccgtttgatgaaaatttcccgtcctagataatcagaaaagcgcggcagatattcgagcggcgttggcgcgccgataaactccagccgtggaaaacgggttaaattatgcagtggcataacagcctccgatgtgtgttgttgtgattttcttattatgcacgctgaaaacgcgtaaataaaaaaggcgctagtgaaagcgcccttttttgtcattatgctgattatttggtcacatcagcaccaaaccatttttcggaaagggcttgcagagtgccatctttttgcatttccgcaattgcatcattcactgctttcagcaggtcctcatttcctttacgcagcgccacgccagactcctgacgggagaatgcttcaccggttactgccagcgtatcgttggttttcttcaccagatccagcgccgccagacgatcaacgaggatcgcatcgatacgccctacgcgcagatcctgatatttggtcgggtcatcatcataggtacgcacatcgacgccctgaacattctgccgcagccactcttcatagttggtgcccagaccgacccccacttttttgcctttcagatcatcggctgttttaatggtgccttcgttaccttttttcaccagcgcctgaataccagaaatggtgtacggggttgagaaatcgtattttttcttgcgctcatcagaaatggtgacctgattaatcaccacatcaatacgtttagagtccagcgacgccagcataccgtcccatttggtcggttttagtgacgcctcaacgccaagatgttttgccagctgttgggcaaattccacttcaaaaccggttaatttgccgtcatctccctgaaaactgaacggcggataagttccttccagccctaccagcagcgtgccgcgctctttaactttattaagcagaccttcatctgcaaaacttttaacgctcatgcccgcaaccagcgccacggccatcacacccatcaatgcctgacgtcccagatgtgctaatttcatattcaccccgaatgttgttatgtctgtttgcagtgtagagccattgtttgtaaacacaaaaacaactccgctacatcttattcttatttaatatatatcagaagaaggcaggctggaggatttctgcacaagtctggtacaggtttggcgctgatagtgttgatacttccgtaacgcgatgcggtaattgttggtgctggtggtgggcagccacggggcgaggatttcatcaaggaaaccgtcctgcagctgatcgagggaaatattttgctcgtgtagatgattccccaaacggcgcaaacgaacgacatattcacgcaccgtacctgggctcatttcagtttgctcaaaaagaaattgcttaaagccgataatatcgaaaaaatcactctgcgttttgcaatgtaaatcaccgcaaaatcggcacaatgccgcccatgatttttgttccgtttgccagccattttcatcaagcagcgtgtccaggcgggaaatctcgattttattcactattttgccgtcgcgaactaaggtaatgcgatcgagtaatttacggcaatgcgcgcaatgggtctggctgtgtttaaagtctttaagatagcggcttaatggccgtcttttcaggtgctgcaccatcattaagaactcctggtagtcaaagttaaagtgcggcatttactgacgttataacttacccagtttagtgcgtaaccgtttaatagcctggctgtgtaactgactgacccgcgattccccgacctccagcaccgcgccaatctctttgagattcagctcttcctggtaatagagggttaataccagtttttcgcgctccggcaacgtttcgatggcttccatcacccgctggcgcagattactgtccagtagttgttgtagcgggttttctcgctgatgatcatcagtaaccagttcgatgctatcgccgtgctcttcgcgccactcatcgtaggagaagagctggctgttattggtgtcgagcaacatttggcgataatcggcaatatcgatccctaaacgttccgctacctcagtttccgtggcgttgcggccaagttcctgctccagttgccctattgcctgtgccacttcacgcgcgttgcgtcgcacgctgcgcggcacccagtcacggctgcgaagttcatccagcatagcgccacggatacgctgcactgcgtaagttgtaaatgccgttccttgtagggcgtcatagcgttcgacggcattaagtaacccaatgccgcccgcctgtagcagatcgtcaagttccacgctcgcgggcagtcgaacctgcaggcgcaatgcttcgtgacgcaccagcgggacataacgctgccacagcgagtgtttatccattacaccttcagcggtatagagtgaattcacgataaacagccctgcgttatatgagttatcggcatgattatccgtttctgcagggtttttaatcggacgattagtgggtgaaatgaggggttatttgggggttacaggtaaattccaggcagaaaaaaaccccgccggtggcggggaagcacgttgctgacaaattgcgctttatgttgccggatgcggcgtaaacgccttatccggcctacaaaaatgtgcaaattcaataaattgcaattcaacttgtaggcctgataagcgcagcgcatcaggcaatttggcgttgccgtcagtctcagttaatcaggttacaacgattaaccctgcagcagagacagaacctgctgcggtacctggttagcttttgccaacacggagttaccggcctgctggatgatctgcgctttcgacatattggacacttcggtcgcatagtcggcgtcctgaatacgggactgcgcttcagacaggttggtagtggtgttgttcaggttggtaaccgcggaatccagacggttttgcaccgcaccgagggaagaacggaatttgtctacagatgcgatagcatcgtccagcgctttcagcggatccgtggttttaccatttgcaacagcagtcagagcctcaccaccagcagtcaaacctgtttgcagattaccgccatttaaatcggcagaatcgtatgttttaccatcaatatcgaccacttctgttttgccatcatctccgcccagtttgaccgcggttggagaactggcggcaccggaagagtcagtataggtaatagttttaacagaaacagcaccagtagtttcattcacatccgcagcgtaaagattgccatttgtatctttaagcgcatatgtatcggtatcattacccttggaatcctgcagttttactaagctaacagcaccaaggttggcagttgcggaacctgcagtattatcaatctgaacaggtgtaccgcctgaagtgatagttgtagctttagtagtatttgcatcagttacagttgcatttgccgttgctccagtcgccattgtcactgtaccatcattagcaactgttactgcgtaatacttcccatcgttatcaccaccggtgattttcgcatagtaatcattaccattatcagtataaacaccctcaattgaagctgggttagttccgccagtatcagtggctgcttccgtagaaagggtaattccagtaagtttaatattgtttgtggtggtagcaccaaaagcagttactggagcactagtggtaactgtatcgttatttttaacgctaaaaccatcaaggccaagagttttagcatcaatctgcttcagatcgatagtgatagtctggttatcatttgcgccaacctggattttcatggagccattttttgccagcacgttcacgccgttgaactgggtctgaccagatacgcggtcaatttcatccagacgggatttaatttcgtcctggatagaagacagatcagactcagagttagtaccggtagtggcctgtaccgtcagttcacgcacacgctgtaagttgttgttgatttcggacagcgcgccttcggtggtctgcgcaacggagataccgtcgttggcgttacgggccgcctgagtcaggcctttaatgttagaggtgaaacggttagcaatcgcctgacccgctgcgtcatccttcgcgctgttaatacgcaagccagaagacagacgctcgatagaactcgacagcgcagactggttcttgttgatattattttgagtgatcagcgagaggctgttggtattaatgacttgtgccatgattcgttatcctatattgcaagtcgttgattacgtattgggtttccacccgtcggctcaatcgccgtcaaccctgttatcgtctgtcgtaaaacaacctttagaatttttttcaaaaacagccattttttgttagtcgccgaaatactcttttctctgccccttattcccgctattaaaaaaaacaattaaacgtaaactttgcgcaattcagaccgataaccccggtattcgttttacgtgtcgaaagataaaaggaaatcgcatggcaagtatttcatcgctgggagtcgggtcaggtctggatttaagttccatccttgatagcctcaccgccgcgcaaaaagcgacgctaacccccatttcaaatcagcaatcgtcgtttaccgctaaacttagcgcctacggtacgctgaaaagcgcgctgacgactttccagaccgccaatactgcattgtctaaagccgatcttttttccgccaccagcaccaccagcagcaccaccgcgttcagtgccaccactgcgggtaacgccatcgccgggaaatacaccatcagcgtcacccatctggcgcaggcgcaaaccctgaccacgcgcaccaccagagacgatacgaaaacggcgatcgccaccagcgacagtaaactcaccattcaacaaggcggcgacaaagatccgattaccattgatatcagcgcggctaactcatcgttaagcgggatccgtgatgccatcaacaacgcaaaagcaggcgtaagcgcaagcatcattaacgtgggtaacggtgaatatcgtctgtcagtcacatcaaatgacaccggccttgataatgcgatgacactctcggtcagcggtgatgatgcgctacaaagttttatgggctatgacgccagtgccagcagcaacggtatggaggtctcggttgccgcccagaatgcgcagctgacagtcaacaacgtcgccatcgagaacagcagcaacaccatcagcgacgcgctggaaaacatcaccctgaacctgaacgatgtcaccacgggcaaccagacgctaaccatcactcaggacacctccaaagcgcaaacggcgattaaagactgggtgaatgcctacaactcgctaatagataccttcagcagcctgaccaaatacaccgccgtagatgcgggagctgatagccagagttctagcaatggtgcactgctcggcgactccacgctgcggacgattcagacgcagttgaaatcgatgctgagtaataccgtcagttcttccagctataaaacgttggcgcagattggtatcacgaccgatcccagcgatggcaaactggaactggatgccgacaaactcaccgctgcactgaaaaaagatgccagcggcgtaggtgcattgattgttggcgatggtaaaaaaaccggcatcacgaccaccatcggcagcaacctgaccagttggctttcgacaacgggcattattaaagccgctaccgatggcgttagtaagaccctgaataaattaactaaagactacaacgccgccagcgatcgcattgatgcgcaggtcgctcgctacaaagaacaatttacccaactggacgttttaatgacctcgttaaacagcaccagcagctacttaacgcagcagttcgaaaacaacagtaattccaagtaagcaatattcatcgggagacaggtcatgtacgcggcaaaaggcacccaggcctatgcacaaattggcgtcgaaagcgccgtaatgagcgccagccagcagcagctggtcaccatgctatttgatggagtgctgagcgcactggttagagcgagcctgtttatgcaggacaacaatcagcaaggcaaaggcgtctctttgtcaaaagcgatcaacatcattgagaacggactgcgggtgagtcttgatgaagagagcaaagacgaactaacccaaaacttgattgctctttatagctatatggtcaggcgcttgctgcaagccaatttacgcaacgatgtctccgcagtcgaagaagtggaagcattaatgcgcaatattgccgatgcctggaaagagtcgttactctccccttctttgattcaggacccagtctgatgaaccatgcaccgcatttatatttcgcctggcaacaactcgtcgaaaaaagccagctcatgttacgcctggcaacggaagaacaatgggacgaactcatcgccagcgaaatggcgtatgtgaatgcggtgcaggagattgcacatttgactgaagaggttgacccgtccaccacgatgcaggagcagctccgcccgatgctgcgcctgattctcgacaacgaaagcaaggtaaagcagttattacagattcggatggatgaactggcgaaactggtcggtcagtcatcggtgcaaaaatcggtgttaagtgcctatggcgatcagggcggctttgtgctggctccgcaggataacctcttttgaatctgaatgagtcgatggctcgcgaataatccgattacggctacgcttctaatgttccccttgaatggagtcgaagaatgcgtaatcccacgctgttacaatgttttcactggtattacccggaaggcggtaagctctggcctgaactggccgagcgcgccgacggttttaatgatattggtatcaatatggtctggttgccgcccgcctataaaggcgcatcgggcgggtattcggtcggctacgactcctatgatttatttgatttaggcgagtttgatcagaaaggcagcatccctactaaatatggcgataaagcacaactgctggccgccattgatgctctgaaacgtaatgacattgcggtgctgttggatgtggtagtcaaccacaaaatgggcgcggatgaaaaagaagctattcgcgtgcagcgtgtaaatgctgatgaccgtacgcaaattgacgaagaaatcattgagtgtgaaggctggacgcgttacaccttccccgcccgtgccgggcaatactcgcagtttatctgggatttcaaatgttttagcggtatcgaccatatcgaaaaccctgacgaagatggcatttttaaaattgttaacgactacaccggcgaaggctggaacgatcaggttgatgatgaattaggtaatttcgattatctgatgggcgagaatatcgattttcgcaatcatgccgtgacggaagagattaaatactgggcgcgctgggtgatggaacaaacgcaatgcgacggttttcgtcttgatgcggtcaaacatattccagcctggttttataaagagtggatcgaacacgtacaggaagttgcgccaaagccgctgtttattgtggcggagtactggtcgcatgaagttgataagctgcaaacgtatattgatcaggtggaaggcaaaaccatgctgtttgatgcgccgctgcagatgaaattccatgaagcatcgcgcatggggcgcgactacgacatgacgcagattttcacgggtacattagtggaagccgatcctttccacgccgtgacgctcgttgccaatcacgacacccaaccgttgcaagccctcgaagcgccggtcgaaccgtggtttaaaccgctggcgtatgccttaattttgttgcgggaaaatggcgttccttcggtattctatccggacctctacggtgcgcattacgaagatgtcggtggtgacgggcaaacctatccgatagatatgccaataatcgaacagcttgatgagttaattctcgcccgtcagcgtttcgcccacggtgtacagacgttatttttcgaccatccgaactgcattgcctttagccgcagtggcaccgacgaatttcccggctgcgtggtggtcatgtcgaacggggatgatggcgaaaaaaccattcatctgggagagaattacggcaataaaacctggcgtgattttctggggaaccggcaagagagagtagtgaccgacgaaaacggcgaagcaaccttcttttgcaacggcggcagcgtcagcgtgtgggttatcgaagaggtgatttaaattcatccccggcggcaagccggggagatttcattacggcagtggcgtcggtaacggcgctttatccagcgcggcggcacactctgctgtcgggcgatccacacgctccatcgtcataccatcgtactcaatggtgttaccgtcacgctcaacctcgtacagctcacgttttacggtaacgttagtgagatcatcagacatcaatgtcaacttacccggcacggcaatcacccgctgccactgacggcaatccagggtatcgccctctttagtgacaatcaggctgcctatcgcttccgggctgaccagcgcacgttgcggccctttggtctgccagtagcccgccagccagtccggcgcgggggttttcacgacattgttatagttttcgacttcggcacagcccgccagcaacaagagcgcgcctgcaattgcgagttttttcatcattcgtcctgcatgagaagaaaagaggattgtggcattaaagccctgatgtcgccagcctttcaaggttcagagagaaatttgatctaactattatttttgtgaattattaccccgaaaataaatttgcatggtgtatgattcgcgactcttgtttcaaaccttctgagttcagaggctacattcatgtcatggcagcaattcaaacacgcctggttgattaaattctgggcccccatccctgcggtcatcgcggcgggtattctctctacttactattttggcattactggcaccttttgggctgtcacgggtgaatttacccgttggggcggccagctcctgcaactgttcggcgtccatgctgaagagtggggttactttaaaattatccatctggaaggatcgccattaacccgcatcgacgggatgatgatcctcggtatgtttggcggctgctttgccgcagcgctgtgggccaacaatgtcaaactgcgaatgccgcgcagccgtatccgcattatgcaggccatcattggcggcattatcgccggttttggcgcgcgtctggcaatgggctgtaacctggcggcgttctttaccggtattcctcagttctcgctgcatgcctggttctttgccatcgccactgccattggttcatggtttggcgcgcgctttaccctgctgcccatcttccgtattcccgtgaaaatgcagaaagtttctgccgcctcaccgctgacgcaaaaaccggatcaggcgcggcgtcgttttcgtctcgggatgctggtctttttcggcatgctgggctgggcgctgctcacagcgatgaaccaacccaaactggggctggcaatgctgtttggcgtcggctttggtttactgattgaacgtgcgcaaatctgctttacttcagcgttccgcgatatgtggatcaccggacgtacccatatggcgaaagcaatcattatcggtatggcggtgagtgccatcgggatcttcagttacgtacagttaggcgttgaacccaaaatcatgtgggcgggaccaaacgcggtaattggtggtttactgtttggttttggcatcgtgctggctggcggctgcgaaaccggctggatgtaccgcgcggtagaaggccaggtgcactactggtgggtcggtctgggcaatgtgatcggctcaacgattctggcgtattactgggatgatttcgctccggcgctggccaccgactgggacaaaatcaacctgctgaaaacctttggtccgatgggtggcctgctggtgacatatttgctgttgtttgctgcgctgatgttgattatcggctgggaaaaacgcttcttccgccgtgcggcaccgcagactgctaaggagatcgcatgaaaaatatcgttcctgattaccgccttgatatggtgggtgaaccctgcccttatccggcagtcgcaacccttgaggcgatgccgcagttaaaaaaaggggaaatcctggaagtggtgagcgactgtccgcagtcgatcaataatattccactggatgcgcgtaatcacggctatacggtgctggatattcagcaagacgggccgaccattcgttatttaattcagaagtaatccctcattcccgctgtgacccacagcgggaacatcgttacctttgtatcacatagattttacccgcccccactcctattcttttcagtatgatctcaggaggtttctatgtgtggacgctttgcccaatcccaaacgcgtgaagattaccttgcgcttctcgcggaagatattgaacgcgatattccctatgatcccgaacccattggcagatacaacgtcgcgccgggaaccaaagtcctactgctcagtgaacgtgatgaacaccttcatctggatccggttttctggggatatgctcccggatggtgggataaaccgccgctgattaacgcccgcgtagaaactgcggcaaccagtcgtatgtttaaaccgctctggcaacatggtcgggcaatctgttttgccgatggctggtttgagtggaaaaaagaaggcgacaaaaaacagcctttttttatctatcgtgctgatggacaacctatttttatggccgcgataggtagcacaccatttgagcgtggtgacgaagccgaaggatttttgatcgtcactgctgcggcagatcaaggtctggtagatattcatgaccgccgcccactggtactgtcgccagaagctgcgcgggaatggatgcggcaagagattagcggtaaagaagcctcagaaatcgcggccagtggctgtgttccagcaaaccagttctcctggcacccggtatcgcgcgcggtgggtaatgttaaaaaccagggcgcggagttaattcaacctgtttgataagcctggagattattgatcaacaatactgcgtcataagaaatctctattagacaaagatttcattacctgttggcatattgcaaaaataacaccaatacggaatcgtcatgttcacgattaaaacagatgatctcacccatccagcagtgcaagcattagtggcttaccatatttccggcatgctgcagcagtctccccccgaaagcagtcatgctttagatgtgcaaaaattacgtaacccgacagtgacattctggtcagtatgggaaggcgaacaactcgcaggaattggtgcgctgaagttgctggatgataaacacggcgagctgaaatcaatgcgtaccgcgccaaattatttacgtcgtggtgtcgccagtctgattttacgccacattttgcaggtcgcccaggacagatgccttcatcgcctgagcttagaaacgggtacacaggctggatttacggcctgccatcaactttatttgaagcatggtttcgctgattgcgaaccgtttgctgattatcgacttgatccacacagtcgatttttatcattgacgctatgcgaaaataatgaattgccatgagccagacgcagcacattcttgcattcgacgtgctgcgcctttatttatcaccagcaggaaacgccttgtccatagacgccccttccacatgcgccacaagaaacctctattccagtgacacaattgcgcctaattaattacatttaatatttaattatgagttcctcaccatctattacatactttttaaccatatcggaatatttatcataatcagcgggattcgtaacaatatattttcgctgcgatctttcatagcaaatccctgtcaaagtccatgatataaaaatgtctcttcaaaagaattacattctttaaaaagtaattctttattgctatatatcgcagagacaacctcaatatcacactccatacgtgctttctccagatgatttgggaagtattgaatttcttttatcttattatcgccacaattaaacagcttagtagtctcaggcattgctggtatttaccatattttattgcgataaatagaaattgtcatagcctttgacggagatgagtcaacacgcgatatcagattattatctacggagacctgggtaattccatcggatacttttggaaataccatataattattgaaatcgagctctaattctttgcagaatttgggaatttgtattgtggcaaggccattatgacgaagataaagcacctcaatccaggatggaagaggtggcaaagaccccaagtgaagatctgttaagtcaagtttactattgtggagttcaacacatttaaacaatctcaccaatgctatatccacattttttttgaagtcattcgatgcgccttcttttactgaattagcccagtcgctgaaacctttgcaaagtctggaatctgtaattttcgtaaagttgtctagaaactctgcaatattagtcgatataaactctaatttatgccgaatgggtgggttaccagttccctgattttttctatcatgataaaacctatcttattataaatcgagaaatcttgaaaccagagactataatcaccccattcgaaatattctgagtgcaataacttaaattctgacagcatattaaataatttgctgtcttcactaattggtgtaaacttaccatttccaagacaactgactaactcacttgataattcatttatgattgcatcatcagatactaactcatgttgttttatcgtagattcagtattagatgtgactttatttaattgaaccggctgagtttttaacgaaagatcatttaatggaaacatttacactcctgtttaataaattatattgcccagggcgcattctaaaacacaataaaattaccactatcaaaaatcgctcatatccatcgcccggaatatgaataaaaacatcaacaaagattaaattatccagaggttactgttgcgtctgtggtcgtaacaacatccgacgtggtgatgtgtcaaatgagacgctctgatgttcaggggggttatcgcgtatacggatcgtggatggcagaaaacgttcaggatcaggtatccattttaaaccagaaattgagtgagtttgccccatccatgccccacgcggtgagatcggatgtaattaacaacaggttacaaaacctacacctgcatgctcatcacttcctgatacgccgccaccagcttattacgcacctgaatccccatttgcatagaaactgaggctttttgcatatcggtcatcacatcgtttaacgccacgccgggttcaccgagagtgaatttttctgcctgcgtgcgggcagctgtttgtgtatcactaatgcgatcgagcgcggcgtgcagctgcccggcaaaactaatggtcggttgcggcagtgattcctgcgcacgcgcactcatcgccgtagcctgtaactggctgataaccccttcaatcccctgtatcgctgacattctcgtctcccggataatttctggtagcaaagcctaccagtaagtcaataagacaaaggcgctaaatagcaacaaaaaaacgggtttattggcggatagaaaaaaacgaaagcacaaataatgggagcgtcaatttttcgagtttgctgacccgggagtgagtcttgttccactttgccaataacgccgtccataatcagccacgaggtgcgcgatgaatgcgactgcagcccagacaaaatctcttgagtggcttaatcgcctgcgtgcgaatccgaaaattccattgattgttgccggttccgcggcagtggcggtcatggtcgcactgatcctgtgggcgaaagcccccgactaccgcacattattcagcaatctttccgatcaggatggtggcgcaattgtcagccaactgacgcaaatgaatattccttaccgcttcagcgaagccagcggcgctattgaagttccggcagataaagttcacgaactgcgtctgcgcctggcacaacaaggtttgccaaaaggcggcgcggtcggtttcgaactgcttgatcaggaaaagtttggtatcagccagttcagcgaacaggtgaattatcagcgggcgctggaaggcgagctttctcgtaccatcgaaactatcggcccggtaaaaggggcgcgcgtacatctggcaatgccgaaaccgtctttattcgtccgtgaacaaaaatccccttctgcatcggtgacggtaaatctgttacccggccgcgcactcgatgaagggcaaattagcgccattgtgcatctggtttccagcgccgttgctggtctgccgccgggaaacgtcacgctggtggatcagggcggacatctgttaacccagtccaataccagcgggcgcgatcttaatgacgctcagttgaaatatgccagcgatgtcgaaggccgtattcagcggcgtattgaagcgatcctgtcgcctattgttggtaacggtaatattcacgcccaggttacggcgcagctggacttcgccagtaaagaacaaacggaagaacagtatcgccctaacggtgatgaatctcatgcggcgcttcgttcacgccagcttaatgagagcgagcaaagcggttccggttatccgggcggcgtaccgggggcgttgtcgaatcaaccggcacctgcgaataacgcgccaatcagcacgcctccggcaaatcaaaataaccgccagcagcaggcgagcaccaccagcaatagtgggccgcgtagcacacagcggaatgaaaccagtaactacgaagtcgatcgcaccattcgtcataccaaaatgaacgtgggcgatgtgcaacgtctgtcagtcgcggtcgtggtgaattacaaaaccttgccagatggcaaaccgttgcctctcagcaacgaacagatgaagcaaattgaagatctgacccgcgaggcgatgggcttttctgaaaaacgcggtgactcgctcaatgtcgttaactcgccgttcaatagcagtgacgaaagcggcggagaactgccattctggcaacagcaagcgtttatcgatcagttacttgctgccggtcgctggttgctggtactgctggtggcgtggctgctgtggcggaaagcggtacgtccgcagctaacacgtcgcgctgaggcgatgaaagctgtacagcaacaggcgcaggcccgcgaggaagtggaagatgcggtggaagtccgcctgagcaaagacgaacaactacaacaacggcgcgctaaccaacgtctgggggcagaagtcatgagccagcgtatccgtgaaatgtctgataacgatccgcgcgtggtggcgctggtcattcgccagtggataaataacgatcatgagtaacctgacaggcaccgataaaagcgtcatcctgctgatgaccattggcgaagaccgggcggcagaggtgttcaagcacctctcccagcgtgaagtacaaaccctgagcgctgcaatggcgaacgtcacgcagatctccaacaagcagctaaccgatgtgctggcggagtttgagcaagaagctgaacagtttgccgcactgaatatcaacgccaacgattatctgcgctcggtattggtcaaagctctgggtgaagaacgtgccgccagcctgctggaagatattctcgaaactcgcgataccgccagcggtattgaaacgctcaactttatggagccacagagcgccgccgatctgattcgcgatgagcatccgcaaattatcgccaccattctggtgcatctgaagcgcgcccaagccgccgatattctggcgttgttcgatgaacgtctgcgccacgacgtgatgttgcgtatcgccacctttggcggcgtgcagccagccgcgctggcggagctgaccgaagtactgaatggcttgctcgacggtcagaatctcaagcgcagcaaaatgggcggcgtgagaacggcagccgaaattatcaacctgatgaaaactcagcaggaagaagccgttattaccgccgtgcgtgaattcgacggcgagctggcgcagaaaatcatcgacgagatgttcctgttcgagaatctggtggatgtcgacgatcgcagcattcagcgtctgttgcaggaagtggattccgaatcgctgttgatcgcgctgaaaggagccgagcagccactgcgcgagaaattcttgcgcaatatgtcgcagcgtgccgccgatattctgcgcgacgatctcgccaaccgtggtccggtgcgtctgtcgcaggtggaaaacgaacagaaagcgattctgctgattgtgcgccgccttgccgaaactggcgagatggtaattggcagcggcgaggatacctatgtctgataatctgccgtggaaaacctggacgccggacgatctcgcgccaccacaggcagagtttgtgcccatagtcgagccggaagaaaccatcattgaagaggctgaacccagccttgagcagcaactggcgcaactgcaaatgcaggcccatgagcaaggttatcaggcgggtattgccgaaggtcgccagcaaggtcataagcagggctatcaggaaggactggcccaggggctggagcaaggtctggcagaggcgaagtctcaacaagcgccaattcatgcccggatgcagcaactggtcagcgaatttcaaactacccttgatgcacttgatagtgtgatagcgtcgcgcctgatgcagatggcgctggaggcggcacgtcaggtcatcggtcagacgccaacggtggataactcggcactgatcaaacagatccaacagttgttgcagcaagaaccgttattcagcggtaaaccacagctgcgcgtgcacccggatgatctgcaacgtgtggatgatatgctcggcgctaccttaagtttgcatggctggcgcttgcggggcgatcccaccctccatcctggcggctgtaaagtctccgccgatgaaggcgatctcgacgccagtgtcgccactcgctggcaagaactctgccgtctggcagcaccaggagtggtgtaatgaccacgcgcctgactcgctggctaaccacgctggataactttgaagccaaaatggcgcagttgcctgcggtacgtcgctacgggcgattaacccgcgctaccgggctggtgctggaagccaccggattacaattgccgctcggcgcaacctgtgtcattgagcgccagaacggcagcgaaacgcacgaagtagaaagcgaagtcgttggctttaacggtcaacggctgtttttaatgccgctggaggaagtcgaaggtgtcctgcccggcgcgcgtgtttatgccaaaaacatttcggcagaagggctgcaaagcggcaagcagttgccgctcggtccggcgttattaggtcgcgttctggacggcagcggtaaaccgctcgatggcctgccctcccccgatacgacggaaaccggtgcgctgattaccccgccatttaacccgttgcaacgtacaccgattgaacatgtgctggacaccggcgtgcgcccaatcaatgccctgcttaccgttgggcgtgggcagcgtatggggctgtttgccgggtccggcgttggtaaaagtgtgctgctggggatgatggcacgttacacccgcgccgatgtcattgtcgtgggtttgattggtgaacgtgggcgcgaagtaaaagattttattgagaacatcctcggtgccgaagggcgtgcacgctcagtggtgattgccgctccggcggatgtttctccgctcctgcgaatgcagggtgccgcctatgccacgcgcattgccgaagattttcgcgatcgtggtcagcatgtgttgctgattatggactccctcacccgctacgcgatggcccagcgtgaaattgcgctggcgattggcgaaccccccgccaccaaaggttatccaccgtcggtgtttgccaaattaccggcactggtcgagcgtgccggaaatggcattagcggcggcggctcgattaccgcgttttataccgtgctcactgaaggcgatgaccagcaggatccgattgccgactccgcgcgggcgatcctcgacggtcacattgtgctgtctcgccgactggcggaagccgggcactatccggctatcgatattgaagcgtcgatcagccgcgcaatgacggcgttgatcagtgagcaacattacgcgcgagtgcgcaccttcaaacagctgttgtcgagttttcagcgtaaccgcgatctggttagcgtcggcgcgtatgccaaaggcagcgatccgatgctcgataaagccatcgccctgtggccgcagctggagggctatttgcaacaaggcatttttgaacgcgcggactgggaagcgtctctccaggggctggagcgtattttcccgacagtgtcataacccaggagataacggcagatggcagaacatggtgcgctggcgaccctgaaagatctggcagaaaaagaggtagaggatgccgcgcgcctgctgggtgaaatgcgtcgcggatgtcagcaggcggaagaacagctcaaaatgctgattgattatcagaatgaatatcgcaataacctcaacagcgatatgagtgccgggataaccagcaaccgctggatcaactatcagcagtttatccagacgctggaaaaagccattactcagcatcgccagcaacttaatcagtggacgcagaaagttgacattgccctgaacagttggcgagaaaaaaaacaacgtttgcaggcctggcagacactgcaggaacggcaatccacggcggcactgcttgcagaaaaccgcctcgatcagaaaaagatggatgagttcgcccagcgcgccgccatgaggaaacctgaatgattcgcttagcgcccttgattaccgccgacgttgacaccaccacattgcctggcggcaaagccagcgatgctgcacaagattttctcgcgttgttgagcgaagcattagcaggcgagacaactaccgacaaagcggccccccagttgctggtggcaacagataagcccacgacaaaaggcgagccgctgatcagcgatattgtttccgacgcgcaacaagctaatttactgatccctgtggatgaaacaccgcctgtcatcaacgacgaacaatccacatcaacaccgttaaccaccgctcagacgatggcgttggctgcggtggctgacaaaaatacgacaaaagacgaaaaagcggatgatctgaatgaagacgtcaccgcaagcctgagcgccctttttgcgatgttgccgggttttgacaatacgcccaaagtgactgatgcgccgtcaaccgtgttaccgacagagaaaccaacgctcttcacaaaactgacttctgagcaactcacaacagcacagcctgatgacgcccccggcacaccagctcagccattaacaccgctggtagcagaagcccagagtaaagcggaagtcatcagcacaccttcaccggtgaccgctgccgccagcccgctaatcactccacaccagacacagccactgcccaccgtcgccgcacctgttttgagtgcaccgctgggttctcacgaatggcaacaatcattaagccagcatatttcgctgttcacccgccaggggcaacaaagtgcagagttgcgtctgcacccgcaggatttaggtgaagtgcaaatctccctcaaagtggatgataaccaggcgcaaatccagatggtttcaccgcatcagcatgtacgcgccgccctggaagcagcgctgccggtactgcgcacgcagctggccgaaagtggcattcagttagggcaaagcaacatcagtggcgaaagctttagtggtcagcagcaggccgcttcccagcaacagcaaagccaacgcacagcaaaccatgaacctctggcgggggaagacgacgatacgcttccggttcccgtctctttacaagggcgtgtaacaggcaacagcggcgttgatattttcgcctaacgtcagaggtagcaccgtaatccgcgtcttttccccgctttgttgcgctcaagacgcaggataattagccgataagcagtagcgacacaggaagaccgcaacacatgactgattacgcgataagcaagaaaagcaagcgatcgctttggatcccgattctggtattcattaccctcgcggcctgtgccagcgcaggttacagctactggcattcgcatcaggttgccgctgacgacaaagcgcagcaacgcgtcgtgccctcaccggtcttctacgcgctggataccttcacggtcaatttgggcgatgcggatcgcgtactttatatcggcataaccctgcgcctgaaagatgaagctacccgctcgcggctgagtgagtatttgccggaagtccgtagtcgcttgctgttactgttttcgcgtcaggatgctgccgtactggcgacagaagaaggcaagaaaaacctgattgccgagattaaaaccacactttccaccccgcttgttgccgggcaaccgaaacaggatgtcaccgacgtgctgtataccgcttttattctgcgataacgacatgggcgatagtattctttctcaagctgaaattgatgcgctgttgaatggtgacagcgaagtcaaagacgaaccgacagccagtgttagcggcgaaagtgacattcgtccgtacgatccgaatacccaacgacgggttgtgcgcgaacgtttgcaggcgctggaaatcattaatgagcgctttgcccgccattttcgtatggggctgttcaacctgctgcgtcgtagcccggatataaccgtcggggccatccgcattcagccgtaccatgaatttgcccgcaacctgccggtgccgaccaacctgaaccttatccatctgaaaccgctgcgcggcactgggctggtggtgttctcaccgagtctggtgtttatcgccgtggataacctgtttggcggcgatggacgcttcccgaccaaagtggaaggtcgcgagtttacccataccgaacagcgcgtcatcaaccgcatgttgaaactggcgcttgaaggctatagcgacgcctggaaggcgattaatccgctggaagttgagtacgtgcgttcggaaatgcaggtgaaatttaccaatatcaccacctcgccgaacgacattgtggttaacacgccgttccatgtggagattggcaacctgaccggcgaatttaatatctgcctgccattcagcatgatcgagccgctacgggaattgttggttaacccgccgctggaaaactcgcgtaatgaagatcagaactggcgcgataacctggtgcgccaggtgcagcattcacagctggagctggtcgccaactttgccgatatctcgctacgcctgtcgcagattttaaaactgaaccccggcgacgtcctgccgatagaaaaacccgatcgcatcatcgcccatgttgacggcgtcccggtgctgaccagtcagtatggcaccctcaacggtcagtatgcgttacggatagaacatttgattaacccgattttaaattctctgaacgaggaacagcccaaatgagtgacatgaataatccggccgatgacaacaacggcgcaatggacgatctgtgggctgaagcgttgagcgaacaaaaatcaaccagcagcaaaagcgctgccgagacggtgttccagcaatttggcggtggtgatgtcagcggaacgttgcaggatatcgacctgattatggatattccggtcaagctgaccgtcgagctgggccgtacgcggatgaccatcaaagagctgttgcgtctgacgcaagggtccgtcgtggcgctggacggtctggcgggcgaaccactggatattctgatcaacggttatttaatcgcccagggcgaagtggtggtcgttgccgataaatatggcgtgcggatcaccgatatcattactccgtctgagcgaatgcgccgcctgagccgttagtgatgaataaccacgctactgtgcaatcttccgcgccggtttctgctgcgccactgctgcaggtgagcggcgcactcatcgccattattgccctgatcctcgctgctgcctggctggtaaaacggttgggatttgcccctaaacgcactggcgttaacggtctgaaaattagcgccagtgcttcactgggcgcgcgtgaaagggttgtggtggtcgatgtggaagatgcacggctggtgctcggcgttaccgcaggtcaaatcaatctgctgcataaacttcccccttctgcaccaacggaagagataccgcagaccgattttcagtcggtcatgaaaaatttgcttaagcgtagcgggagatcctgatgcgtcgtttattgtctgtcgcacctgtccttctctggctgattacgcccctcgccttcgcgcaactgccgggtatcaccagccagccgctgcctggcggtggacaaagctggtcgctcccggtgcagacgctggtgttcatcacctcgttgacgtttattccggcaattttactgatgatgaccagtttcacccgcatcatcattgtttttggtttattgcgtaacgcgctgggaacaccctccgcgccacctaaccaggtattgctggggctggcactgtttttgaccttttttattatgtcaccggtgatcgacaaaatttatgtagatgcgtaccagccattcagcgaagagaaaatatcaatgcaggaggcgctggaaaaaggggcgcagccgctgcgtgagtttatgctgcgtcagacccgtgaggcagatttagggttgtttgccagactggcgaataccggcccgttgcagggacctgaagccgtgccgatgcgcattttgctcccggcctacgtgaccagcgagttgaaaaccgcatttcagataggcttcacgattttcatcccttttttgattatcgacctggtgatagccagcgtgttgatggcattggggatgatgatggttcccccagccaccattgctctgccctttaaactgatgctgtttgtactggtggatggctggcaattgctggtcggttcgctggcgcagagcttttacagctagagaggcaaaatgacacctgaatcggtcatgatgatggggactgaagcgatgaaagtcgcgctggcactggctgccccgctattgttggtagcgttggtcacgggccttatcatcagtattttgcaggccgccacgcagattaacgaaatgacgctgtcgtttattccgaaaatcatcgccgtatttatcgccattattattgccggaccgtggatgctcaatctgttgctggattacgtccgcaccttgttcactaacctgccgtatatcatcgggtagccgtactatgttgcaggtgacaagcgaacaatggctatcctggttaaacctgtacttctggccgttactgcgcgtgctggcgctgatctccaccgcgccgattctgagcgaacgcagcgtaccgaaacgggtaaaactgggtctggcaatgatgatcacgttcgccattgccccatcattacctgccaacgatgttcctgttttttcgttctttgctctgtggctggccgtgcagcagatcctgatcggcattgcgcttggttttaccatgcaatttgcctttgccgctgtgcgaaccgctggcgaaattatcggtctgcaaatggggctgtcatttgcgacgtttgtcgatccggccagccatcttaatatgcccgttttagcgcgtatcatggatatgctggcgttactgctgttcctgacatttaacggtcatttatggttgatttcactgctggtcgatacctttcacaccctgccgattggtggcgaaccgttgaacagcaatgcgtttctggcactcaccaaagcagggagtttgattttccttaacgggctgatgctggcgttaccgctcattactctgctgctgacactgaatctggcattaggtttacttaatcgtatggccccgcaattatccatttttgttattggatttccattaactctgactgtcggcatctctttaatggcggcattaatgccgttaattgcacctttttgcgaacatttattcagtgaaatttttaatttgctggctgatattattagtgaattgccattaatataattccgtaacgtttatcatgttatcctaaggattatccgaaaaataatacctacgaacatcttccaggatactcctgcagcgaaatatttgttttaagctcactcacatatcgcaacatttactttactttaagacaattccaggcaaattatacaacactttacgggatagtaagtccgcctgaaaaatcgcgagagtggcgcattaggtgacccatgttgttccgtttagtcatgatgaaatattcaggtaaggggaattatcgttacgcattgagtgagggtatgccatgtcaacgattattatggatttatgtagttacacccgactaggtttaaccgggtatctgttgagtagaggggttaaaaaaagagaaatcaacgacattgaaaccgttgatgaccttgccatagcttgtgattcacagcgcccttcagtggtgtttattaatgaggactgtttcatccacgatgcttctaacagtcagcgtatcaagctcatcattaatcaacatcccaatacgttatttatcgtttttatggcaattgccaatgttcattttgatgaatatctattggtcagaaaaaatttattgatcagttctaaatcgattaaaccggaatctctcgacgatatccttggcgatattctgaaaaaagagacaacgataacctcgtttttaaatatgccgacgttatcattgagccgaaccgaatcgagtatgttgcgaatgtggatggcaggtcagggaaccattcaaatctctgaccaaatgaatatcaaagccaagaccgtttcatcgcataaaggtaatattaaacgtaagatcaaaacgcataataaacaggttatctaccatgtcgtccgactgacggataatgtgactaatggtatttttgtcaacatgcgctaacacattctgactggtggtttcccaccagtcaggctgaataagattactctgctttctccacaaagataccgtcctgatgccctgcttcattaaagaaccagatgccgagcgggtagtcttccagcgaaaccaggtacattgtgccttcactaaactcctcaactgccagtaccacgccaggacgacgcggaccgccatccgttttgactgttacccgatcattcaccttcatcgttttcctcctgtggctttgtgccagtgtagaacaatttcgtttttctggcagcgccaggcgcgcgcgagtgctgattttctcgacggtctatacttaagagatgccaggcggacttaacgactggcggcaacaacagagtaacggttgcgaggaaagatgatgaaaaccgcaaaagagtacagcgataccgcaaaacgtgaggtcagcgtcgatgtcgatgccctgctggcggcgatcaatgaaattagcgaaagcgaagttcatcgcagccagaacgattctgaacacgttagcgtcgatggacgtgaatatcatacatggcgtgaattggcggatgccttcgaactggatattcatgacttcagcgtctctgaagtgaatcgttgaatgcacaataaaaaaatcccgaccctgagggggtcgggatgaaacttgcttaagcaagaagcacttaaaaaattcgttacaccaggaaatctgatgtgttcatcaccttatccgcaatttttttcgctgacaagaaaatattcgccatatgaatgattaacgctacttatgaatagaaatgtgacgcacgtcaccccttggtggctctggcgtcagcgggatcgctcccgaaaaaatcatctttgataatttgtgcggttttgagaatcatcctggtaagaggagtactgcgcgactatgttttcaattcaacaaccactactggtttttagcgatcttgatggcaccctgctggacagtcatagttatgactggcaaccggcagccccctggctcacccgtttacgcgaagcaaatgttcccgtcattctctgtagcagtaaaacatcagcggaaatgctgtacttgcaaaaaacgttggggctacaaggtttaccgctgattgccgaaaatggcgcagtgatccagcttgctgagcaatggcaggagatagacggttttccacgcatcatctcaggtattagccatggcgaaatcagcctggttttaaatacgctacgcgagaaagaacattttaaattcacgacttttgatgatgtcgacgatgcaaccatcgccgaatggacgggattaagccgtagccaggcggcgctgacgcagcttcatgaggcgtcggtaacgctaatctggcgcgacagtgacgagcgtatggcacaatttaccgctcgtctgaacgaactgggcttacagtttatgcagggtgcgcgcttctggcacgtactggatgcttctgccggaaaagatcaggctgccaactggattatcgcgacctatcaacaattgtcaggcaaacgcccaaccacacttggcctgggcgatgggccaaacgatgcgcccttactggaggtaatggattacgcggtgattgtgaaagggctaaatcgtgaaggggtgcatctgcatgatgaggatccggcccgcgtctggcgaacgcagcgtgaaggaccggaaggatggcgtgaagggctggaccattttttctccgcccgttaagcgttatcgctcgcgaatacccgattacgcccagcctgtttagcgagataaagccgacggtcggccagtgactggagttgttcaaaatcataatcaccggtttcctcgctgctgcttacccccagcgaggcactgatgcgtatcgtcgtactcttggcgatcaacatctctttttcatttaatttcagtcgaatacgttctgcgacctccgcagcctccgtcagactcgcgcctggcagaatcacacaaaactcctcaccaccgacccgcccggcaacgtcctgcgcacgcaaggaactgctaattaatccggcagcatgagaaagaacacggtcgcccgcctgatgaccaaagcggtcattaatcgctttaaaatggtcaagatcgacctgaatgacagaaaaaggatgttggtgcgtctgacacaatttagcgagcggacgggctttttcgaacagtgcgccacggttatataaacgcgttaaggtgtcgtgccacgcctgccactgcaacgagctttgcagaacatacatgttgctaaccatccggcgaatcacataccaggagatgagtaacatggtggtaaagagcgcccacagcagggttaatgcaatgctgatactgccgaaatcgccgcgcacgccttcgcttaacgtatggacacgcaccagcacaccgtcgaaatggtccagacgttcccagctaacatagcgactgtccatacgaatgccgccccgcgtgtcatgttccattgcctgcgccagcaaggccagttcacgaggatcaaaaatattccctgttggatggtcaggattggaagaggtcaaaaatctcagcttactgtcatagagctgatactcaccatcgaggtttttatcgatggcgtttcttaaaaattgctgcatagtacgcacgggaatactcatccccagcacgccataccagtagttattactgtctaccggaacactgacggtaacctgcggttcagtattgctggcgtgttccggttgcgaagtgaaccagcgtaccgcgcggtgacgattttctcgttgtgaatggccaataaaccagggttgggtgacatagccgtaataacgcgttggaacattgcgcgtaaacaaggtcggctgcgtcgaaacgtaaaatccggcacgcgagacatacatcgcctgttcaaccatcgacgaggagttgtgcgctagtcgcagcaagtaaccaacttccagtgcagcggtaatttcattgtcgaggctttcattttcgcgagacaggagattcccctcgctgactaatgcatccgacacaccattaactggcagagtgcgtcgtcggttgagttcgattttccaggcgtgctcgtcgcgatgctgttcgaactcggttacagcatcacgcagagaggtgaaatccagtggcgctacgagagcttcgcgcatgccattacgtaaaaagatcagtttgtcgacgttatactgcaaatgcttatcgagcgcgttggcaacgttttccagatgattacgctggctggagatataggcatcttccagcaccaccacttcacgccaggtgagcaaggtggaaaaaagcaataccacgataaagcagagattaacgacatgaccaggccccaggcggcgtgcgagttttttcaaccagctctggttttccatttttgtctcgtgctgcaccctgacgactcccaacctgcttttttatgattctggcataacctggcgatagcgtaccgcaaaacagcgataattttataatggtggcatgataagacgcgactatcattcattgcaggcattagcacaccaggccggatgtgatccggcctgatgttaatgataccctttcacacttcttccgcagaacgactcccctcccccggaacaagctcggtttcatgaaaagcttcccgcttgaccccgtaaccgtcataccaacgacactcaaccataccgctggagtatccagtgacaatcatccgcgggccgccctctttaaccgtaacttcctcactaaccataaagctcatactcgcctccttttttcgagtgaaacttgttcaccttagttgaagatggcgaattttgcataatagccagtgcgagtattaatgtgcctgaccgcgcattttctctacggctttcactcccagcaccacgatgccgccgatgataaatccaagaatcagatttaaaacagtcggtaatatcatcgccactactgcactttgctgcccggcgaaatgttcaatggcgtgatgcagcggcgcaattccatgtaccacaatcccaccgccgacgaggaacatcgccagcgtgccgacaatcgataacgctttcatcagccagggcgcgataatcaataaccctttacctaatgcctgcatcagcgcgctggatttttccgccagccaataccccaggtcatcaatcttaacgataacccctaccagaccgtagacgcccacggtcactaccagcgcgatgcctgaaagcaccagcacctgattaagcaacggcgcttcggccacaatccccagcgtgatggcgacgatttccgcagacaatataaaatcggtacgaatcgccccttttattttgtccttttcaaacttcagcggatcctgcgccgccagcttctccagacgctgctggctctgcgccggatcttctttatgtttacgcgcctccagcatatgcagcactttctctactccttcaaagcagagaaacgcgccaccaatcatcaacagaggcgtaatcgcccacgggataaacgcactgatgatcagcgccagcggcaccagaatcactttattaatcagcgatcctttcgccacgccccagaccacgggaagttcccggttggcccgcacgcctgaaacttgttgcgcattgagcgataagtcatcccctaatacaccggcggttttcttcgccgccagtttgcccatcacggagatatcgtccagtagtgtggcgatatcatcgagcaacgtcagtaaactactcccggccaaaagcattccctctcatttttattgttgaagggtgtaagtatgaagcaaaaacggcagctctgatacttgcttcacaggtcaacatttttttaacaatcaagtgcaattatatctctcgccagcagaatgattttcacgtttactatgaaccacctttttatttccaccgtgagggattatgcgtttccgccagttgttaccgctttttggcgcgctgtttgcgttgtatatcatttggggctcaacctattttgtcattcggattggcgtggaaagctggcctccgttaatgatggcgggcgttcgattcctggcagccggtattttattgctggcatttttgctactgcgcggacacaaactccccccgctacgtccgctgctcaatgccgcgctgattggcctgttattgctggctgtcggtaatggcatggtgacggttgccgaacatcaaaatgttccttccggcatcgccgccgtagtggttgcaaccgtgcccctctttaccctgtgcttcagccgcctgtttggcattaaaacgcgcaaactggaatgggtgggtattgccattgggcttgccggaatcatcatgctcaatagcggtggaaatttaagcggcaatccgtggggcgcgattctgattttaatcggctcgattagctgggcgtttggctcagtttatggctcgcgcattaccttacctgtagggatgatggcgggtgcgattgagatgctggcggcaggcgtggtgttaatgatcgcgtcgatgattgcgggtgaaaaactgacggcgctcccttccctttcaggcttccttgcggtcggctatctggcgctgtttggttcgattatcgccatcaacgcttatatgtatttaatccgtaatgtcagtccggctctcgccaccagctacgcttacgttaacccggtggtcgcggtcttgctgggtacgggactgggtggagaaacactgtcgaagattgaatggctggcgctcggcgtaattgtcttcgcggtggtactggtcacgttgggaaaatatctcttcccggcaaaacccgtagttgcgccagttattcaggacgcatcaagcgagtaaatgaatcccctgcgtgtcgatctgcgcgctggcaccttcgccgcagatccactcttccagacgctcggtaagcgcttcatccgtcagcttctcgcgcccacgtaacgcgcactcccagacaatcaatacgcgccagccgagttcctgcaagcgactgatatcgcggcgatcgcgctcaacatttttacctatcttctccagccagaactcggttcgagtcgcaggcactttaaacagatagcagtgatgatgatgccagaagcagccatgggtaaatatcacgcagcgatattcatcaacgacaaaatccggacgtccgggcagactggcgtcctgaacgcgaaatgccaggccctgcccggttaacagactggcgaggcgcttctctatcgccgtatcacgcgtggcaatcgcgcgcatatttttgctgcgagtggccttatcgtgaacgtcggccatgttgtgcctcttgctgacgcaacgccaccgcctgtttgatttttggctcaagcagttttgccaccgcggcaaagaccggcacgaccaccgagttaccgaactggcgataggcctgagtgtccgaaaccggaatacggaatttcgcttctcccggcgcttcaaaacccattaagcgcgcgcattcccgaggcgttaaccgacgtggacgatgttgctgattcagcggatcgtcaaagtctttctcacccgtggccatatcccagccgcgatcgattaaaatttccgcgccatctttgtaataacgcgcagacagcgtacgcgtgacgctttgcggattgttcggataaaccattccataaccgaagccgttaccgcgcgcctgatgttttttcgcatatcgatagaggtacttccacagcaccggcgtcaggatatatttcgcctcgaccatcgggtccaacagctgcgccagcgtcactcgctgcgcagggaaacattcgctgatatcacgcagggtaaaatcggctttcagattcagatcgcgacgaaaacccaccagcacgatgcgttcacggtgctgcggcagaaaatgtttgccgtcgatgattttcggatcgtctggcccattatcttctgcatcagccacgtcatagcccagttcgtccagcgtctgcatgatgatgcggaacgttttaccctggtcgtgacttttcaggtttttgacgttttcgagcacaaacatcgccggacgacgcgcgtcgataatgcgtaccacatcaaaaaacagcgtgccctgggtatcgcaggcaaaaccgtgcgcccgcccgagcgagttctttttcgatacgccagccagcgaaaatggctgacaagggaaaccggccagtaaaacatcgtgttcaggaatgtgttgacgaatatgttccgccgccgcctcatcactcacgccttctttatggctgagggtgatgtcgcggatatcttcattaaaatgatgcgtcgccggatcgcaataatggttggctttataagtgcgtaccgcatgtttgttccattcgctggtaaacacgcactgtccgccaatcgattcaaaaccgcgacggatgccgccaattccggcgaatagatcgataaagcgaaacgcataatgcggatgatgtgccggtggtttgggtaataacgtttgcagatgggcgaactctttctcacttaaacggtgccatgccgagtcattcgccagcgcacgttttaaaattgccgcgctccagtgattctcacctacaccattaagctgcgccaccaacgttttaacatcataaatttgcagcagtttctccagcattgcctgtgcggcattcccggtgctgtatgaatcggttactgatatattttcctgcatagatttcaccggccatctgagatggccgacaggttaacataattacagccatttagggccacgcgctcagccagcggatgaaaacgcatctatcaccttgtgatcgacaccttcattctcccccgccagttcggcactgagcttcgccataaactcgactaaaaaatgcgcgttgtgctgcgccagctgcttgcctcttgcggtttgcatggtttgcggtagcttcagcaacttagtctggaaatgatccagcgcgtagcgtttatcatcaagcgggcgatgctgtgcgaacggatcttcaccatcaaacagcgccacgcccaatgcccctgaaacggcaaacacgcgcgccaggccaatcgcccccagggcttccagccgatccgcatcctggacaattttagcttccgttgttaagggggcgatttgcgcgctgaaactgtgagcggcaatggcatgacaaacggcctcgattttctccgccggaaattgctcgaactcttcacggagcaggcgacgcgtctcttctgccgccaggattgaagaacgctgcctttgcggatgatttttcgccaggctcacaatatcgtgaaaataacaggcggttaaaatcaccagcatatcgacatcgtcatctgccgccagcttctgtgccgtagcccagacgcggcgaaaatgacacacgtcatgggccgcgtcctggtgctgatgatggtttttcaaccagttttcgaactgtgcctgccagtgttgtaagtccatacgcgctccgttgccaaagagtcgccaccttagcagtttttattcatagcgtctgctacgtgcgggacgaggtcgggtgtaccaggcaatgctgcctaacaatgccccgaccagagccataaataaaaatccgaccagtgcccctaaccactttcccgcggtagagcctaaatcgctttcaaatcccgacacgggggcatcgggaatccggctcatcacccagatgtaacgcgccattgcccagacgaaatagccacaccatgtatagaaagcccacaaagccagtttgccgccagggctgcgagagagtctctcttccatctttgtcgaaccgtattccattttgagataacccggaaaattcagacttagtactattatgtgataaaagtcacatttttccacattggatgagccagtcaagactcaatcattttttgaacaaatagataaattttgcgcaacggcagtgaatacaggaaaaatcgttttgagcgattttatttatctttgatatcggctttattaattcatttaatcaatatattagcactgattacaattatacctttttattattctgtgtcatgatgcttccgttattagccttttatcgtcttgtttatattttttgggccggcatgatgccggcttttttttatgccttcattaatgtgcgcctgatcacaccagccgtttggcgcaacaatcattgataccccctatgtttccgctcaactcataacatattgatatacatttataattttcatgaatatttatatttagaattcataattatgaattatattaaatagattagaaacattttgatatcttttaaatacatttgttacatgtaatccttaaaataaaatgaacttcatagaatagtatccaaatgtgcttttttttggataacggcacttattgatatattcatgaagattataatcacaagggaatacataatgaaaagaaaagttctggcaatgctggtcccggcgttattagttgctggcgcagcaaatgcggctgaagtctataataaagatggtaataaactggatttgtacggaaaagtagtgggtctgcactacttctctgatgattctggcagcgatggcgacatgtcatatgcccgtatcggtttcaaaggtgaaactcagatcgctgatcaattcactggttatggtcagtgggaatttaacattggcgcaaacggtcctgaaagcgacaagggtaataccgcaacgcgtctggcatttgcaggtttaggctttggtcagaatggtactttcgactatggtcgtaactacggtgtcgtatatgacgtagaagcatggaccgatatgctgccagaatttggtggcgatacctatgctggcgctgacaacttcatgaacggtcgtgctaatggtgttgcaacctaccgtaacaatggcttctttggttaggtcgatggcttgaactttgctttgcaatatcagggtaataatgaaagtggtggaccattcgggcaggaaggttccggtagtggtgatggccgtagcctttccaaagaaaatggtgatggtttcggtatgtcaacatcctacgacttcgacttcggtttaagtctgggtgctgcatatcaaactctgatcgttcagatcgtcaggttggagttggtttaaatgatcgtaaccatagcaacagaaatgctggtggtgaaaccgctgaagcatggactgttggtgcaaaatatgatgctaataatgtgtatttagcagctatgtacgctgaaactcgcaatatgaccccatatggtggtggcgagtttgataatggtgaatcaagatcagccatcgctaacaaaacccaaaactttgaagttgttgctcagtatcagttcgactttggcctgcgcccgtccatcgcttacctgcaatctaaaggtaaggatttaggcggttgggctcatgacggcaacggcgacccacgttacaccaataaagatctggttaaatacgttgatattggtgcgacctactacttcaacaaaaacatgtccacctatgttgattacaaaatcaacctgctggacaacgacgatgacttctacgaagcaaacggcatcgctaccgatgatatcgttgctgtgggcttagtctaccagttctaatcagtcaactcgctgcggcgtgttactgtaaaactgaacactagcctgagttcgtccctcatcgaactcaggcttttttattggcatttcatctccatctgcggcacacgcaattgccgaagcatatcgatacagcaccttaccctgcccctcctggcacaataacatcaaccagctactcttcaagctaacacccaaatgcatttctttatgaattaatccgtaacaaacacgcttcccatatagaaatatttgcaaaaatagtgcatgaaataagctttttctctaccaatccgggatataaatattcatcagcaccacaatattccacagcactaaatctctccccgccaccccgtacctctgataatggtctaaaatcattgaagccacttgcgacgacgttgctcaataaggaaaatttggcgtgaataatattcaacaccagtgcagcatcatcattacatacttacagccgccgactaccgctttcgatatattgactcaattttccagcctggttaaaaatagcgaccagctcagtcgcaaatatagtgactaccctaactaagcaacaataaggaatacactatgactgttcaaacaagtaaaaatccgcaggtcgatattgctgaagataatgcattcttcccttcagaatattcgcttagccaatataccagtcctgtctctgatcttgatggcgtggactatccaaaaccttatcgcggtaaacataaaattctggtgatcgccgcggacgaacgttatttgccgaccgataacggaaaactgttctcgaccggtaaccatccgattgaaacgttgctgccgttgtatcatctccatgctgcaggtttcgaattcgaagtggcgaccatttccggtctgatgaccaagtttgaatactgggctatgccgcacaaagatgaaaaagtaatgccattctttgagcagcataaatcgttgttccgcaatccgaagaaactcgcggatgttgttgccagcctcaacgctgatagcgaatatgcagcaatctttgttcctggtggtcatggcgcacttattggtttacctgaaagccaggacgtggctgccgctttacagtgggcaatcaaaaatgaccgttttgttatctccctttgccacggcccggcggcttttctggcgcttcgccacggcgataacccactgaatggttattccatttgcgcattcccagacgccgcagacaaacaaacgccagagattggctatatgccgggtcatctcacctggtacttcggcgaagaactgaagaaaatgggcatgaatatcattaatgacgacatcaccgggcgagtacataaggaccgtaaacttctcaccggcgacagtccttttgcagcgaatgcgttgggtaaactggcggcgcaggaaatgctggcagcttacgcgggttaatccctgttacgtttgaatgtaagcgcataatcaatcgcggccgcgttagtactcacgacgtggctgcgttttttcacggttaatttatggcgtactgaagccctatgttaatttctttgcggtaacgtaatccggaacacattatgcttattgagatagtgatacgtagcacttcccccatgcaattcggcaatcgctttgactaaagaaaggcctagtccctgacctacggaatgacgcgaattatctccccgccaaaatctacggaagagtttttcaggctcattaattttcgttccagggctggcgatatcaatattaagatagctgttggtatcaagaaaactggttatatgaatacgcgatttttctggcgaatatctaatggcattaacaataagattcgataacattcgttgtagtaaaattttatccgcaaagatttgctgattgcactcgaccttaaagcaaatctctttctcgtctgaaaggtattcaagatagtccaacaaattttcgacttccttattgagagaaagcgagtccagtttcaccaaaacattgtttttatctgccctggcaagaaacagtatgttctctgttaaccgcgaaatattttccagctcttcaatgtttccggcaattgttttttgatattcagcgatacttctggtttgactgagcgtaacctgattctgacccagtaatgcattaattggcgttctaagttcatgagcgagatcgtcagcaaactgacttagacgctcaaaatctttgactaaagcatgatgcattttattcaacgcctgcccaagaggttttagttctctcggtaatgcgctaacctcaacaggctctcggctatcgttataattcagcgcttccgttacaccactcaactttttgatctctcgtaatcccgttctgattaacagcggacttaatactgagcaaagtacaatggcgacaatgcaaattataatgctattaattttatactgttcaagcatgttatgtctggctgaagccaatttagccacagtaaccgttaatgatggcgaaacttcatcaatattaattcgtaaagcatctatctctgtatcattaataatgcttctgtaaatgccagctgcgctgattgtctcactagcaggtatgttatttaacatgccatcactgacatttgtccggttaacaattttattgatgctatcaccatgaataatcaagatatcctgactaacatccatcatccggttaaagtacacaggtaacgtatctggatttaccccatcaattaacaactgcttgatctgcgctgtccggttaatgagtgttgtatcatcgcgccatttcaactcacttgccaggccattatagagagtccagacaattccggcgccagcaacagacagtagcaatataaaaagcaaggttaaacggacggttatagatagtcttttcattatttttttaccgctacgaatgaatagcccatcccccggattgtggcaattagcttttcaggaaaaggatcatcaacttttgcgcggagcctgcgaatggcgacgtccaccgtattggtatcactatcaaagttgattccccaaatttcactcgcaataaccgttctgggtataatttcgccagctctggaggccagtagccaaagtaactgaaactccttgcgcgtcagtgtaatactgatattgtccctgctcacactatgactaacagagtccattcttaagccgctgatttctaatgttgaattcaaagcgtgatgttgccttaattgtgcccgaacccttgccagcaactcagaaaatgaaaaaggttttaccagataatcatttgccccactgtccagccctctgactctgtcatcgacagaatcccttgcagtaaggcaaataacaggggtttgctttgctgttcttaacgtttgtaagatctgccagccatccatacccggaagcataatatccagaatgatcaatgcataatcatccttcagcgcaagataaagcccatctctgccatcagaaacggcatcgatgacataacccgcttcggaaagcccctgcgttacccattcctgggtcctttgattatcttcaataagtagaatcttcatgaaaataatatgccataaatcatatgttatagaaacagcctggttcattacaaaattgtaatgctgctgtaaggttaccctggacgctttttcgctatcctcaaaactcattcacatgacaaggatataaacatgttaaagcgttatttagtactctcggtagcaacggcagcattttcattaccttctttggttaatgccgcacaacaaaacattcttagcgtgcacattttgaaccagcaaacaggaaaacccgctgctgacgtgacagtcactcttgaaaagaaggcggataacggctggttacaacttaataccgccaaaacagataaggatggacgaattaaggcactgtggcccgagcaaactgcaactacgggcgattaccgtgtcgtatttaaaaccggggactatttcaagaaacaaaatcttgaaagtttcttccctgagatccccgttgaatttcatattaataaagtgaacgagcattatcatgtgcctttattacttagccaatatgggtattcaacctatcgtggcagttaatgcataaatatgtaaaagcagatctctgctactgttagggaggacactccctgacagattaacagtaaacggctcttgctggctaacgacaaaaaagtgtgatggcttatgaaaaagaatcaatttttaaaagaatcagatgttacggccgagtcggtattctttatgaagcgtcggcaggtgttaaaagcactgggcatcagtgcaactgcactttctttgcctcacgctgcgcatgccgatctgcttagctggtttaaagggaacgatcgcccgcccgcccccgccggaaaagcgctggagttcagcaagcctgccgcctggcaaaataacctgccactgacgccagcagataaagtttccggttataataacttctatgaattcgggctggataaagccgatcccgccgctaatgctggtagcctgaaaaccgatccatggacactgaaaatcagcggcgaagtggcaaaaccattgaccctcgatcatgatgacttaacccgtcgcttcccgctggaagagcgtatttatcgtatgcgctgcgtggaagcgtggtcgatggtggtgccgtggattggttttccgctgcacaaattgctggcgcttgccgaacctaccagcaatgcgaagtatgtcgctttcgaaacaatttatgcaccggaacagatgccaggccagcaggaccgctttatcggcggtgggctgaaatatccttatgtcgaaggattgcgtctcgacgaagcaatgcatccgctcacactgatgaccgtaggtgtttatggcaaggcgttaccgccacaaaatggcgcgccggtgcgactgattgtgccgtggaaatatggctttaaagggattaaatcgatagtcagtattaagctgacccgcgagcgtccgccaaccacctggaatctggcagcgcctgacgaatacggtttttacgccaacgttaatccgtatgttgatcacccgcgctggtcacaggctaccgaacgatttattggttcaggcggcatcctcgatgtacagcgccagccaacgctactgtttaatggttacgccgcccaggtggcatcgctgtatcgtggcctggatttgcgggagaatttctaaatgcgtctgacagcaaaacaggtgacatggctgaaagtttgcctgcatcttgccggattgttgccgtttctctggctggtctgggcgatcaatcacggtggactgggtgccgatccggtgaaagatattcagcattttactggtcgcactgcactgaaatttttgctggcgaccttgttaatcacccctctggcacgctacgcaaaacagccgttattgatacgcactcgccgcctgttaggattatggtgctttgcctgggcgacactgcatttaacaagttacgcattgctggagctgggcgtgaataatctggcgttattaggtaaggagttaattacccggccttatttaacgttaggtattatcagctgggtaattttgcttgctttagcgttcacttcaacccaggcgatgcagcgaaaactcggcaagcactggcaacagttgcataatttcgtctatcttgtcgcgattctggccccaatacattatctgtggtccgtgaagattatttcaccgcagccgctcatctacgctgggctggctgtactgcttttagccttacggtataagaagttgcgttccctttttaaccggttacgcaagcaggttcacaacaaattatctgtataacttcatattgccgacaaagtacgcgttatccctgccggatgtggcgcgagcgccctatccggcatacacagatcgcatcaggttatgtttcgtttgtcatcaacctcaaatcaccaaaataatttattttatttcaataagatagataagtagaactgagaaagccatgctctcgtttcctaagagttgttgcattttgctatatgttacaatataacattacacatcatatacattaactctggaggaaactgttttggcgattcgtctttacaaactggctgttgctttaggtgtctttattgttagcgctcctgccttttcgcatggtcatcactcacacggcaaacccttaacagaggtcgaacaaaaagctgctaatggtgtttttgatgatgccaatgtacaaaaccgaacgctcagtgactgggatggagtctggcaatccgtttatcctttactgcaaagtggcaaacttgaccccgtctttcagaagaaagcggatgcagataaaactaaaacatttgctgaaattaaagattattatcacaaaggttatgcaacagatatcgagatgattggcattgaggacggcattgttgaattccatagaaataatgaaacaacatcgtgtaaatatgattacgatggatacaaaatactcacctataaatcaggcaagaaaggcgttcgttacttattcgaatgtaaagatcctgaaagcaaagcccctaaatatatacaatttagcgatcatataattgcaccacgaaaatcatctcattttcacatttttatgggtaatgattcacagcaatctttattaaatgaaatggaaaactggccaacgtattatccatatcagttgagtagcgaagaagtggtcgaggaaatgatgtctcattgagtattctcatgataacgcctcgatgccgctttagtaagttatcataactgccactggtccatccacaaacgccactgaacgcaagctagctacagacacgctcatcactatgacgtgtctgtatattaataagctaacccgcattgagttaaccaataacggattccatacacaatacggccaacagagaaagatacctgtgctcacgccattgcttatattggctggttacaatatgcactatcaattttttaaataacaaattattaaaaccacatctgtataaggaatttttaaggttcgtgggatagcttgactgtgaaaatcacaggagctacaaaaatgaaccgattctcaaaaactcaaatttatttacattggataacgctgcttttcgttgcaataacctatgccgcgatggaactccgtggctggtttcctaaaggtagtagtacttatctgctgatgcgagaaacacattacaatgcgggtatattcgtttgggtgttaatgttttcacgcctgattataaaacaccgttatagtgatccttctattgtgccaccgccacctgcctggcaaatgaaagcggcttcgctaatgcacatcatgctttatataaccttccttgcacttcctctgctggggattgctttgatggcttacagtggaaaatcgtggagtttccttggtttcaatgtgtctccctttgttaccccaaacagcgaaattaaagcactgataaaaaatattcacgaaacctgggcaaatataggctactttttaatcgcagctcacgctggcgcagcactctttcatcactacattcagaaagataatactctgttacgaatgatgcctcgccgcaaataagtcgatccccttacaaggaaatgtgaaccatggacatcaacgcgtcataaatgtttacgcaagtgcacaatgcaccctttccactatcaacaaggaggagcagaaactgtgtaaatcgtacaatggtaagacttatcaaaaatacaggttaattttggtatttaaaccttttttacttgttagtatgatacaaaggctttcaaaaaagctgcgaaattcaacaactcttggaaattatggactttgtcccgcggctttaatctgacggccgcgttccttttttgactcaattattgaacccttctctacgcaacttcagttcccaccaccaactttgcggcagtttcataggatgaatgtctaaaagaataatggtgagcgataagaaaacgactgaataactgcacattttcgctcgaaagcttcctgtcagatccatagcgaatcaagtgctgaatgtcacagtatcgaacagaaaacagtgacgatctaacccttcaagaatattctacgattgttctgtttaggaaaagcaaggcgggaagtcgggagataagtcattgataaagtggcggagagagggggatttgaacccccggtagagttgcccctactccggttttcgagaccggtccgttcagccgctccggcatctctccgttcagatggttgccatgatgccaggaaatttggcattttaacagtccctgtccgtgcaattttgttcaagtgacgagtttgcgagcaaaacgatgattaagtggccctggaaagtacaagaatcagcacatcaaactgcccttccctggcaggaagcactatcgatcccccttttaacgtgtctgacggaacaggaacaaagcaaattagtcactcttgccgaacgttttttacagcaaaagcggcttgttcctttacagggctttgaactggattcattaagaagctgccggatagcacttctattttgcctacccgttctggagttaggactggaatggctggatggttttcatgaagtcttaatttatcctgcgccatttgtggtcgatgatgaatgggaagacgatatcggtctggtgcataaccaacgtattgttcagtcaggtcagagctggcagcaagggcctatcgttttgaactggttggatatacaagattcttttgatgcttctggttttaacctgattattcatgaagtcgctcataagctggacacccgtaacggcgatcgcgccagcggagttccctttattccgttgcgtgaggttgctggctgggaacacgatcttcatgctgcaatgaacaacattcaggaagaaatcgaattggttggcgagaatgcggcgagcattgatgcttatgcagccagcgatcctgctgaatgttttgccgtactttctgaatatttctttagcgccccagaactttttgctcctcgtttcccttcattgtggcaacgtttctgccaattttatcaacaagatcctttgcagagactgcatcacgctaatgatacagactcgttttcggcgacgaatgttcattaattaacaactttgcagattaattaaccaattgaaatgacttatgaaatttagtgttgacagacaaggtaccgctaagtaatattcgccccgttcacacgattcctctgtagttcagtcggtagaacggcggactgttaatccgtatgtcactggttcgagtccagtcagaggagccaaattctaaaaattcgcttttttagcgcaatgtcactgaccttagttgaacattgttttttaacggatagcgggtttttaacatcttaagcgccctcgacctttatggttgagggcgttttgctatgaacgccatcaccattttcccctcgattataaaacttgagttattcagtagtctcccctcttgcaactcacacccaaaactgcctaacgaaaagttattaattttcaatcatattgctatcagtatttacattttttcgctgtgctagaaagggcgcatttatgttagctcgttcagggaaggtaagcatggctacgaagaagagaagtggagaagaaataaatgaccgacaaatattatgcgggatgggaattaaactacgccgcttaactgcgggtatctgtctgataactcaacttgcgttccctatggctgcggcagcacaaggtgtggtaaacgccgcaacccaacaaccagttcctgcacaaattgccattgcaaatgccaatacggtgccctacacccttggagcgttggaatcggcccaaagcgttgccgaacgtttcggtatttcggtggctgagttacgcaaactcaaccagtttcgtacgtttgctcgaggttttgataatgtccgccagggtgatgaactggatgtcccggcacaagttagtgaaaaaaaattaaccccgccgccgggtaatagcagtgacaacctcgagcaacagatagccagtacttcacagcaaatcgggtctctgctcgccgaagatatgaacagcgagcaagcggcaaatatggcgcgtggatgggcctcttctcaggcttcaggcgcaatgacagactggttaagccgcttcggtaccgcaagaatcacgctgggcgtggatgaagattttagcctgaagaactcccagttcgattttctccatccgtggtatgaaacgcctgataatctctttttcagtcagcatactctccatcgtactgacgagcgtacgcagattaacaacggcttaggttggcgtcatttcactcccacatggatgtcgggcatcaacttctttttcgaccacgatcttagccgttaccactcccgcgccggcattggcgcggagtactggcgcgactatctaaaattaagcagtaacggctatttgcgactgaccaactggcgcagcgcacctgaactggacaacgattatgaagcacgcccggccaatggctgggatgtacgcgcagaaagctggctacccgcctggccgcaccttggcggtaaactggtctatgaacagtattatggcgatgaagtggccctgttcgataaagacgatcggcaaagtaatcctcatgccataaccgctggacttaactatacccccttcccgctgatgaccttcagcgcggagcaacgccagggtaaacagggcgaaaatgacacccgttttgccgtcgattttacctggcaacctggcagcgcaatgcagaaacagcttgacccgaatgaagtcgctgcacggcgtagccttgcaggcagccgttatgatctggtggatcgcaacaacaatatcgttctggaatatcgcaaaaaagaactggttcgcctgaccctgacagaccccgtgacagggaagtcaggagaagtgaaatcactggtttcgtcgctacaaaccaaatatgccctgaaaggctataacgtcgaagccaccgcactggaagctgccggtggcaaagtggtcacaacgggtaaagatattctggttaccctgccggcttaccggttcaccagtacgccagaaaccgataacacctggccgattgaagtcaccgccgaagatgtcaaaggcaatttgtcgaatcgtgaacagagcatggtggtcgttcaggcacctacgctaagccagaaagattcctcggtatcgttaagtacccaaacattgaacgcggattcccattcaaccgccacactgacttttattgcgcatgatgcagcaggtaatcctgttgtcgggctggtgctctcgacgcgtcacgaaggtgttcaggacatcaccctttctgactggaaagataatggtgacggaagctatacccagatcctgaccacaggagcgatgtctggcacgctgacgctgatgccacagctgaatggtgtggatgcggctaaagcccccgccgtggtgaatatcatttctgtttcgtcatcccgaactcactcgtcaattaagattgataaggaccgttatctctccggcaatcctatcgaggtgacggtagaactgagagatgaaaatgacaaacctgttaaggaacaaaaacagcaactgaataacgcagtcagcatcgacaacgtgaaaccaggagtcactacagactggaaagaaaccgcagatggcgtctataaggcgacctataccgcctataccaaaggcagtggacttactgcgaagctattaatgcaaaactggaatgaagatttgcataccgctggatttatcatcgacgccaacccgcagtcagcgaaaattgcgacattatctgccagcaataatggtgtgctcgccaatgagaatgcagcaaacaccgtctcggtcaatgtcgctgatgaaggaagcaacccaatcaatgatcataccgtcacgtttgcggtattaagcggatcggcaacttccttcaacaatcaaaacaccgcaaaaacggatgttaatggtctggcgacttttgatctgaaaagtagtaagcaggaagacaacacggttgaagtcacccttgaaaatggcgtgaaacaaacgttaatcgtcagttttgtcggcgactcgagtactgcgcaggttgatctgcagaagtcgaaaaatgaagtggttgctgacggcaatgacagcgtcacaatgaccgcgaccgtccgggatgcaaaaggcaacctgctcaatgacgtcatggtcactttcaatgttaattcagcagaggcgaaactgagccaaaccgaagtgaatagccacgacgggatcgccacagctacgctgaccagtttgaaaaatggtgattatagggttacggcctctgtgagctctggttcccaggctaatcaacaggtgaattttatcggtgatcaaagtactgctgccctgaccctcagtgtgccttcaggtgatatcaccgtcaccaacacagctccgcaatatatgactgcaaccttgcaggataaaaatggcaacccactaaaagataaagaaatcaccttctctgtgccaaacgacgtcgcaagtaagttctcgattagcaacggaggaaaaggcatgacggatagtaacggggttgcaatcgcctccctgaccggcacgttagcgggcacgcatatgatcatggctcgtctggctaacagcaatgtcagcgatgcacagccaatgacgtttgtggcggataaagacagagcggttgtcgttttgcaaacatcgaaagcggaaatcattgggaatggcgtggatgagacaactctgacagcaacagtgaaagatccgtcgaatcatccggtggcggggataacggtaaacttcaccatgccacaggacgttgcggcaaactttacccttgaaaataacggtattgccatcactcaggccaatggggaagcgcatgtcacgctgaaaggtaaaaaagcgggcacgcatacggttaccgcaacgctgggtaataacaataccagtgattcgcagccggtaacatttgtggcggacaaagcctcggctcaggttgtcctgcagatatcaaaagatgagatcacaggtaatggcgtcgatagcgcaacgctaactgcaacggttaaagatcagttcgacaatgaggtgaataatcttccggtaacattcagctcagcctcttcaggactcaccctgaccccgggagtaagtaataccaacgagtctggcatcgcgcaggccactctcgcaggcgttgcctttggtgagaagacggttactgcatcactggctaataatggtgccagcgacaacaaaactgtgcattttattggcgacacagcggcggcaaaaattatcgagttggcgcctgtcccagacagcataatcgccggtaccccgcagaacagctccggcagcgtcatcaccgccacagtcgttgataataatggctttccggtgaaaggtgtgactgtgaacttcaccagcaacgcagcgacagccgaaatgacgaacggcggtcaagccgtgacgaacgaacagggtaaggctaccgtcacttataccaatacccgctcctcgatagaatcaggagcgagaccggataccgttgaggccagtctggaaaatggtagctccacgcttagcacatcaattaatgtcaacgctgatgcgtctacggcacatctcaccttgctacaggcactttttgatacagtctccgcaggcgagacaaccagtctgtatattgaggtgaaggataattacggcaacggtgtcccccagcaggaggtaaccctcagcgtttcaccaagtgaaggcgtgacccccagtaataacgctatatatactaccaaccacgacggcaatttttacgcaagctttaccgctacaaaagccggggtttatcaattgacggcaaccctcgaaaatggcgattcgatgcaacaaacagtgacctatgtgccgaacgtcgcgaatgctgaaatcacgctggcagcctcgaaggatccggtgattgccgacaataacgatctcacgacactaacagcaacagtcgctgatacagagggcaatgcgatagccaacactgaggtaacatttactctgccggaagatgtgaaggcgaacttcacgctgagcgatggcggtaaagtgattactgatgctgaaggcaaagcgaaagtcacgctgaaaggtacaaaagcaggcgctcatactgttacagcatcgatgactggcggtaagagtgagcagttggtggtgaactttattgcggatacgctcactgcgcaggttaatcttaacgttaccgaggacaattttatcgctaataacgtcgggatgaccaggctgcaggcaacagtgactgatggaaacggcaacccgttagccaatgaggcggtgacattcacgctaccggcagatgtgagcgcaagctttactctcggacaaggcggttccgccattactgatatcaacggcaaggctgaagttacactgagcggtacaaaatccggcacctaccccgtgacagttagcgtgaacaattatggtgtcagtgatacgaaacaggtgactttgattgccgatgctggtaccgcaaaactagcctccttaacctctgtatactcattcgtcgtcagcacgaccgagggcgcaaccatgacggcaagcgtcactgacgctaacggcaacccggtagaaggcataaaagttaatttccgcggaacctccgtcacgctaagcagcaccagcgttgaaacggatgatcggggtttcgctgaaattcttgtgacaagcaccgaggtcggactgaaaacagtttcagcctctctggcagataaacctactgaagtcatctcgcgattactgaatgccagtgcagatgttaattctgcgacgattaccagtctggagataccggaaggtcaggtaatggtcgcacaagacgtagcagttaaagctcacgttaacgaccagtttggcaacccggttgcgcatcaacccgtgacattcagtgcagagccatcctcgcaaatgatcatcagccagaatacggtctctactaatacgcagggtgtagccgaggtcaccatgacgcccgaaagaaacggttcgtatatggtgaaagcatccctgccgaatggagcctcacttgagaaacaactggaggctattgatgaaaaactgacactcacggcgtccagtccgcttatcggtgtctatgcccctacaggcgctactctgacggcaacgctaacctctgcaaatggcactccagtggagggtcaggtcatcaactttagcgtaacgccagaaggggcgacgttaagtggcggaaaagtgagaactaactcttcaggtcaggctccagtcgttttgaccagcaataaagtcggtacatatacggtgactgcatctttccataacggcgtaacaatacagacacagacaaccgtgaaagtcactggcaactcaagcaccgcccatgttgctagctttatcgctgatccatcgactatcgccgccaccaacactgatttaagtaccttaaaggcaacggttgaggatggcagtggtaacctgatcgaaggtctcactgtgtacttcgccttaaaaagcggctctgccacattaacgtcattaacagcggtgaccgatcaaaacggaatcgcgacaacaagcgtgaaaggagcgatgacaggtagcgtcacggtaagcgcagtcacgaccgctggtggaatgcaaacagtagatataacgctggtggctggcccggcagacacctcgcagtccgtccttaagagcaatcggtcatcactgaaaggggactataccgatagtgctgaattacgtcttgttctgcacgatatatcaggcaatccgatcaaagtttctgaagggatggaatttgtgcaatcaggtactaacgtgccctatataaaaattagcgcaattgattacagtctaaatatcaacggtgattacaaagccactgttacaggaggcggagagggtatcgcaacgctgatccctgtattgaatggtgttcatcaagctggtctgagtaccacaatacaattcactcgcgcagaagacaaaataatgagcggtacagtatcagtcaatggtactgacctaccgacaactacattcccttcgcaggggttcaccggggcgtattatcagttgaataatgacaactttgccccaggaaaaacggcggctgattatgagttttcaagctctgcctcctgggtcgatgttgatgctaccggtaaagtgacatttaaaaatgtcggcagcaattcggaaaggattacggcgacgccaaaatcaggaggccctagctatgtatacgaaatccgtgtgaagagttggtgggtgaacgccggcgaggctttcatgatatacagccttgctgaaaatttttgcagcagcaatggctacacgctccccagagcaaactatttaaaccactgtagttcccgaggcatcgggtcactgtacagtgaatggggagatatggggcattacacgactgacgctggttttcaatcaaatatgtattggtcatctagtcccgcaaactcaagcgaacaatacgtagtttccctggcaacaggtgatcaaagcgtatttgaaaagcttgggtttgcttatgcgacatgttataaaaacctgtgattttccgttataatttcttaaagagtgttccattcggggcactcttttttacattccctctacagaactagcccttctctcacagaaaatgaataaataaaaatgcggcaccgccagaatcgcgttcgatgtgactatgatcattttcggtgagtactgctttgatctaaaggctggttttctgtgatgattgaccagcctcagagtattgatgacaccaccgttcataacagatcggcattactatgcataagtactgtctcatattctcgccaaaacactttttaatgcctttgcgaattcatccagacttatattgtcaattttttgcccaacgacgactgactccgagacatcggccattgcgggccatcgcgttttgtaatcagcataaattgcaacaacaggggtattataggcacttgccatatgtaatattgaggtgtcaggagttattgcgatataagcatcttttatgattgctgctgaacgtttaatcgagggtggtaaggataaacggtagacattattataacaatccactaatgccctggctttatcttcacctttgggtccatgaacgatcactattggtatatctgtttcactttaaatttttgctattagattttctgcaatcgataatgaaaatgtacgttcctgcgagctaccttctaaattgaacgcaatgtaagatcctaacgatcgcatttcctcgcgcacctcatcgagtacatcctcacttagtggcaattcatatattggcctgactgctggaaaacccgcctcacgcatcataaatgcccatgtcataggtacgggagcccggagtttctgatccatactggacgcgttcttgcacaaaggggagaagcaattcatggttataccaacaacctgaaaattcgtttttgctttcaactgactgataaataacatcgttttcaggttctttttacgcatcccctcaatgcaaagatccggcgtaccgtattgctgtgttatgttctttgctaaatcttttatttcttttaatgttgcgtgatcctgcatagtcattgtgactaatgttaatttagtctgttcaagtttaagcgcattaaagacttctaaattaattgtcgacgttacaattaaaagatgcttaattttatgcaattcaagcgcccgaataacaggaaagatggccatagcatcgccaatctgatcgggaatatggatgacaacaaagtctgttttttcaatattgaaattataagctttataatcgtagtaactaaatgcaatacgtctcaacaatgatgctaaaaacatacctaacctcgcctccctactggttataatgcaatgcagtctatcagactcatcagggtgccattttgtgcatatgcggacttttatgtttcatatctctaacctgtgggtcctctgcttaatccttaaacaacaccagcaactcctgcgctttcatcttccatcgaatttttcatgttgccgctaatcagccataaaatcatttgcagatgcgctctgtcgaggtagtctcataaggttcgtttatagatcgacggcaatgtgagttaccttttccatactaattataaaaagacagtacaaacaggatcattatggactccacgctcatctccactcgtcccgatgaagggacgctttcgttaagtcgcgcccgacgagctgcgttaggcagcttcgctggtgccgtcgtcgactggtatgattttttactctatggcatcaccgccgcactggtgtttaatcgcgagtttttcccgcaagtaagcccggcgatgggaacgctcgccgcatttgctacctttggcgtcggatttcttttccgtccgctcggcggtgtcattttcggtcactttggcgaccgactgggacgtaagcgcatgttaatgctgaccgtctggatgatgggcatcgcgacagccttgattggtattcttccttcattctcgaccattgggtggtgggcacctattttgctggtgacactgcgtgccattcagggatttgcagtcggcggcgaatggggaggcgcggcgttgctttccgttgaaagtgcaccgaaaaataaaaaagccttttacagtagcggtgtacaagttggctacggtgtaggtttactgctttcaaccggactggtttcattgatcagtatgatgacgactgacgaacagtttttaagctggggctggcgcattcctttcctgtttagcatcgtactggtactgggagcattgtgggtgcgcaatggcatggaggagtccgcggaatttgaacaacagcaacattatcaagctgccgcgaaaaaacgcatcccggttatcgaagcgctgttacgacatcccggtgctttcctgaagattattgcgctacgactgtgcgaattgctgacgatgtacatcgttactgcctttgcacttaattattcaacccagaatatggggctaccgcgcgaacttttccttaatattggtttgctggtaggtggattaagctgcctgacaattccctgttttgcctggcttgccgatcgttttggtcgccgtagggtttatatcacaggtacgttaatcggaacgttgagcgcatttcctttctttatggcgcttgaagcacaatctattttctggatagttttcttctccataatgctggcaaacattgcgcatgacatggtggtgtgtgtgcaacaaccgatgtttaccgaaatgtttggtgccagttatcgctatagtggcgctggagtcggttatcaggttgccagtgtggttggcggtggatttacaccttttattgccgctgcactcatcacttactttgccgggaactggcatagcgtcgccatttatttgctggctggatgcctgatttccgcaatgaccgctttgttgatgaaagacagtcaacgcgcttgatagcctggcgaagatcatccgatcttcgccttacacttttgtttcacatttctgtgacatactatcggatgtgcggtaattgtatggaacaggagacacacatgaataataagggctccggtctgaccccagctcaggcactggataaactcgacgcgctgtatgagcaatctgtagtcgcattacgcaacgccattggcaactatattacaagtggcgaattacctgatgaaaacgcccgcaaacaaggtctttttgtctatccatcactgaccgtaacctgggacggtagcacaaccaatccccccaaaacgcgcgcatttggtcgctttacccacgcaggcagctacaccaccacgattactcgccctactctctttcgttcgtatcttaatgaacaacttacgttgctgtatcaggattatggtgcgcatatctcagtgcaaccctcgcagcatgaaatcccttatccttatgtcatcgatggctctgaattgacacttgatcgctcaatgagcgctgggttaactcgctacttcccgacaacagaactggcgcaaattggcgatgaaactgcagacggcatttatcatccaactgaattctccccgctatcgcattttgatgcgcgccgcgtcgatttttccctcgcacggttgcgccattataccggtacgccagttgaacattttcagccgttcgtcttgtttaccaactacacacgttatgtggatgaattcgttcgttggggatgcagccagatcctcgatcctgatagtccctacattgccctttcttgtgctggcgggaactggatcaccgccgaaaccgaagcgccagaagaagccatttccgaccttgcatggaaaaaacatcagatgccagcatggcatttaattaccgccgatggtcagggtattactctggtgaatattggcgtgggaccgtcaaatgctaaaaccatctgcgatcatctggcagtgctacgcccggatgtctggttgatgattggtcactgtggcggattacgtgaaagtcaggccattggcgattatgtacttgcacacgcttatttacgcgatgaccacgttcttgatgcggttctgccgcccgatattcctattccgagcattgctgaagtgcaacgtgcgctttatgacgccaccaagctggtgagcggcaggcccggtgaggaagtcaaacagcggctacgtactggtactgtggtaaccacagatgacaggaactgggaattacgttactcagcttctgcacttcgttttaacttaagccgggccgtagcaattgatatggaaagtgcaaccattgccgcgcaaggatatcgtttccgcgtgccatacgggacactactgtgtgtttcagataaaccgttgcatggcgagattaaacttcccggccaggctaaccgtttttatgaaggcgctatttccgaacatctgcaaattggcattcgggcgatcgatttgctgcgcgcagaaggcgaccgactgcattcgcgtaaattacgaacctttaatgagccgccgttccgataataagttctgaaccttcttatcagaaatagatgtgaaggagtaagtaagacacctggcaaatagcctgcaataatcgtgggctgtttgcttccttgggcggatacgagttttattatcgtcttaatgatttccacatattaaaagcaagtatgctttcaaaacacaattataaaaaatcccgccaacaatataagtttttataaaattaaatataagattatggctttagaatatttttatttctaatagacgagatttttcctgttatgatataatatgctgaattaacacatgttaacgatttaccagtaatgtaaataaattttcgaggagatcattccagtgggacgtaaatgggccaatattgttgctaaaaaaacggctaaagacggtgcaacgtctaaaatttatgcaaaattcggtgtagaaatctatgctgctgctaaacaaggtgaacccgatccagaattaaacacatctttaaaattcgttattgaacgtgcaaagcaggcacaagttccaaagcacgttattgataaagcaattgataaagccaaaggcggcggagatgaaacgttcgtgcagggacgttatgaaggctttggtcctaatggctcaatgattatcgccgagacattgacttcaaatgttaaccgtacgattgctaacgttcgcacaattttcaataaaaaaggcggcaatatcggagcggcaggttctgtcagctatatgtttgacaatacgggtgtgattgtatttaaagggacagaccctgaccatatttttgaaattttacttgaagctgaagttgatgttcgtgatgtgactgaagaagaaggtaacattgttatttatactgaacctactgaccttcataaaggaatcgcggctctaaaagcagctggaatcactgagttctcaacaacagaattagaaatgattgctcaatctgaagttgagctttccccagaagatttagaaatctttgaagggcttgttgatgcccttgaagatgacgacgatgtacaaaaagtttatcataacgtcgcaaatctctaattatcttttaaagaaatctgtctttacggcagatttctttaatctcatataattcttataaaaaatataatattcaactcgtcatattgattatacccccccgttcccagagaaataatatttattaaaattccagttcttctttttctgattacagaaggcaaagtggcaattacgcatagtttcccgataaagacgcgatagcgacatcccgcataaggcatttttctctttatctttgtacggtacttcatggaacagagtttttgaccttgcgaatcgtgatgtctgttggggagggacaatttgctcactgaagcgtgagactcgattaagcgcacgaaacacagaaatcaaaaaacccggtcacttttttacaaggtaaccgggtaaaaataatttttattttttaactgttttgagactcatagagatgtctcaaaactaaaatttggctcctctgactggactcgaaccagtgacatacggattaacagtccgccgttctaccgactgaactacagaggaatcgtgagaacgaggcgaatattagcgatgcccacccacaatgtcaaagcctgttttttaaatttgaaatcgtttgctgaaataatctgcattttgtcgtttattccgacacaactggctttttttcacacttttgcggctcgggtcgagggtatttccatagccaacgtccagtaaccattcgccagtaaaacagcacggcccgcacagcccagtcggcaaacattcccatccagacaccaaccacaccccagccaagcatgattcccagcacataaccgactacaacccgacaaccccacatgctcaacatcgaaacccacatggcgtaacgggcatcacgagcacctttaaatccagcgggtagcacccatgaggcggaccaaataggcataaataaagcatttagccaaatcagaatcacaacgacatgtttaacctgtggatcctgggtgtaaaacgatgccataaccccggcaaagggagccgttagccaggcgatggccgttaatccaagagtggaaagccagaacacatgccgcaactgaatctctgcttgcgctatctgccctacccccaaccttcggcctgtaatgatcgtagaagcagagccgagcgcacttccgggtaagttgataagagccgcaattgaaaacgcgataaaatttccggcaataacactggtccccatcccggcaacgaacatttgggttaataaccgaccactggtaaataacactgattcgacactcgcgggaataccaatccccatgacttcccagataatgctaaaattcagcggtttaaaatagctctttaacgaaatccttagcgcaggattaaaaccaatcgccagcacccacaaaattgcaactgcgccaatataacgagaaatggttaaacccagccctgccccgacaaatcccagtcccggccaggagaaaaggccgtaaatcaatatgccgctaataataatattaagaatattcaggctaccgttaatcaatagcggtattttcgtattccctgcaccacgaagtgccccgctaccaataagagtgatggcagctgctggataactgagtaccgtcagctccagataagtcaacgccagtgctttaacttctgtcgtggcatcacccgcgacgaaatcaataatttgttcgccaaaatgatgaataagcgttgccaacagtacggcaaacaacgtcatgatcaccaatgactgccgcgtcgccaccctcgctcgtcgtcgatcccgcttaccgagactaaatgccacaacgacagtagtaccaagatcgatagcagcaaaaaaagccataatgaccatattgaagctgtccgccaatcccacgccggccatcgcatcttttcccagccagctgaccagaaaagtgctcagaacccccatcaacaggacacaggcattctccatgaagataggaacagcaagcggggttatctcgcgccagaacaacactttgtagctcttgcgtttagcgtgccagcgagtgccgtgaacaacctggcgtaaagcagaggagatattcaaagccgaccttaattgcagaaagtgaaaccacatttcaaataatgagggagaatcagcaaagctgcaaagattttcgccaacaaattgtctgcaaatgcaacaaactgttgatagaaacggcaaacagttggggaatttaaaaatcgggtttgacaaaagatttttcgccgttaagatgtgcctcaacaacgattcctctgtagttcagtcggtagaacggcggactgttaatccgtatgtcactggttcgagtccagtcagaggagccaaattcctgaaaagcccgcttttatagcgggatttttgctatatctgataatcaatttcctcttcactgctttccatcacctgccgcttgatatcctcaactgacagtcctgcattacaaagttccagaaagcgccagacatagttacgctgaagttgtcctcgcttcagtcccaaccagacagtattagcatcaaaaagatgccgcgtatccaggcggattaaattctcttcctcttgttcgccactggattgctcggcaactaatccgatcccaagcccaagagcaacataggttttaatgacatcagaatcctgcgcacttaatacaatatctgccagcaaacctttgcgggcaaatgcgtcatcaatacgtgagcgccccgtaatcccctgtcggtaagtgattaacggccacttcgctattgattccagcgtcaatggtgaaatttgcgtcaagggatgatcgtgtggaacaagcaaactatggtgccaacgaaaccacgggaaggcgacgagctgcgggtcattactcaaacgctcgctggcgataccaatatcagcttcgccattttgcaacaatgtcgcaatttcctgtggcgtcccctggattagctcgagccgaacctccgggaaaagttcgcgaaaagctttaatgacctctggcaagctataacgtgcctgagtatgcgtcgttgcaatagtgagaacgccagacgtatcgttggtaaacaggtctgcaagccgacgaacattactggcttcattcagaatacgttctgcaatgaccagtaatgctttgcccggttcagtcatgcccagcagtcgcttacctcgtcgaacaaatatttcgatgccaagttcatcctccagttcccgaatatgacggctgacgcctgactgtgaggtaaaaagcatattcgcaacctctgtcaggttgtaatcctgacgtgcagcctcgcggattatctttagttgttggaaattcacggtaaactccgggcagttcagatttcccgttattgttaaagtctaatgcccggcataacaaataataaaaacccgcatcttattccatcccgatataacacttagctcaccaattgccactgccttttttccatcactggagaactaatcactgacattaacaactctttcactgcctgtgcctgtggcgataagttcgctctggcgggtaaatttaatgacaaagagagactcatggaaggagtggtaatgcgtgacatccacccatttactgcgccacataacgaacgcgcggccgattcgggtaatactgcaacgcccatgccgctggcaatcgctgcggtaagcgtggcaatagactcaatttcaccaataacttttgccgtgagtcgccgtagggaaaaagcctcatcaacacgaagtctaatagcactgtaatcactggggagaaagaggttcatttgcgcaatagcattcacatcaacgctttgccccgggcaatcttgagttcctaccagaaaaagatcttctttcagcaaagcctgactggatacaccagccacaggggaatgctcataaatcaccgccatatcgagttggtgatttatcaatttttcgttaagcactgcaccactattttcatgaagatagataacgatctccggaaattcagcgcgaaccgcctgtaataagggcatggtgatggatgacgcagcggttcctggtgcaaagccaatcgagacttgccccgataatgcctgaccaacgttatgcaccgccagttgggcctgttcacactgacgtaaaatggcccgcgcatgggtatagagaatttttccggcgtctgttggtgtaacgccccgctttgtacggatcaaaagttgttgatttaactcaccttccagtgtggcaacctgctggctgagcgctggttgtgcgatatgcaatacttcagcagcctgggtcaggctaccaatatctacaatttttacgaagtatttcaggcgtctgaagttcatgttgcctccggtttttaagaatcggcccaagtgccgccattacttacaaccagattgcaagatgcttgccagttttattttggtgttgatgtacaagctaaccaactgtcaaataagagattatgatagattcgtcatttgctcctttaatcagctgtcgcgttcccctgccctataaaaggagggtatgcaccacgatggttcattacccaataagattgaaagctcaccactttgttgaaattgacagcaaacaaacaaaaaaatgcatttcaccctttgacatcaccatgcactgccattaatatgcgccccgttcacacgattcctctgtagttcagtcggtagaacggcggactgttaatccgtatgtcactggttcgagtccagtcagaggagccaaattcaaaaaagcctgctttctagcaggctttttgctttctaattaccaacgctcttaaaacatctgtcttgaaccagaactaatttgcacaggcattcccgatcgacgttgcaacgcagcatttgcgcgatttacatcaacttcttgcccgttgataaacgcccgcaaagatggggttaccggcaatggcacttttcggtcagactcatattctgcacgattgcgcgacaatggctcatgaacttccagccagttcgagccatctggttcagtggtgtattttactggctggtcgataatttgcacacgcgtcccaacaggaacattatcaaacagatatttgatatcgtcattgcgcagacgaatacagccctgacttacccggagcccaataccaaaattggcattggtaccatggatggcatacaacctgccaatataaatcgcgtacagccccatgggattatcggggcccgcaggaacaaatgcgggcaaactctcccctcgtttcgcatattcgcgccgagtgttcggcgttggcgtccaggttggagcttcttgtttacgttcaacggtagtcacccagttacgcggggtttctcgcccagcctggccgataccaataggaaagacttccacagtattactgtctggtgggtagtaataaagacgcatctcagcgacgttaacaacaatccctttacgaacagtgtcgggcaaaatcagttgctgcggaatggtgagttgcgagccagacttcggcaaaaaaacatcagcgcccgggttcgcttccagcatgttacttaacccttgcccgtattgtgcggcaaaagtctccagcggctgggtattgtgatcaggaacagttacagtaaacgactgccccactaaacggctaccctctggaggtaatggataagttaccgccaggctagtatggctggcaaaaagcagagcaaatgagcaaagaatatttacacgacgcatcatgtccctttcctatgtcgcgaaagctatccgttaagtatagcttttatcagacttttcgtttttaactgttcaaatcagaagtcgtattccccggtagaacaatattactggcagcaagttcgcccatgttgttgtatatcgcacaggcagcttcgatgatgggcatcgccagagctgcgccactcccctcacctaaacgcatctccatattgagataaggctccagccccaaatgcgagagcgctatacgcgcgcctttttctgccgacaggtgagaaggaatgagatacggtttgatcgcaggagacatctggcaggctgcgagcgcagcagcataagaaagaaatccatccagcaacacgggtaaaccgcaggaagcagcacctaacatcactccagctattccgaccaaatcaaatccacccacttttgccaggacatcaacaccatcctgaggatttggttgattcaacgtaatcgcccgacgcacaacatcaattttattagccagtttatctgtcggcaggtttgcgccaatcccaaccacttcttcaggatcccggccagtgattgtgctgactattgctgctgccggtgtcgtgtttgccatccccagttcacctacaccaaacagcgtgacaccgttttttgccagctcctgcgtataacatatgacgtccaaaagcaacttttcagcctgacggcgactcattgccggagctgaagcaatattgccgctacctcgtgcgacacgcatgttgataagcccggggataggctcagcagtatcaataccaacatcaattacgtggacgttagcgcccgcttgttctgccagcacacacacgccggttgttccacgggtcatattttcagcctgtatggctgtcacttcttttggagaaatagcgaccccttcctcccagacgccgtgatcggcacacataaccagtaccgcttttttgcccacatgcggtatgccattcaaccccggcattcctgccagttgtatggcaagcacctccagctttcccaggctaccaacaggtttgagtaacccgtcaatatgccgttgtgcacgcgacatagcggtagaatcgatggctgggatcgtattcagtaaatcggcaagtatttgcatctcacgtctctttatagcagtgccagcaggaagaccagttcaccaagctctatggctgctcccagcgtatcgcccgtttgcccgcccagcgtacgtttgagaagctgaccgaggatgaaaatcgccaccatcgtcaccaccatagcagccacaccatgcatacccggcaataatacggcagcaaaaatagcggctaagccgagtgtgacgcaggtttgtcgcccatcaattttgccaatgaacacattgccaagcccttcttcccgcgcataacgatgacgatacatcaataatgcggcagtcccgcggctgaccgcacatgctgccgccagcgatgcaaggatcgattcgccacgcagagccaactcgcttaacaccagaatctttgccagtaccacaaaaatcaatgccagaccgccgtgggtgcctaaacggctatcacgcatgatttccaacatgcgatcgcggctacgtgcagaaaatacgccatcacaggtatcagcgaggccgtccagatggaatcccccggtcatcagcaccagcacaagtacgctaaacagtgccgccagtggtgcgccacaccatgcctgcagcaccatgaagaccagcccgctaatcgcgccaagcaataatccaatcaaaggaaaagtaataataccgcgagaataatgctcgaaatccagtccctgggaccagcgacgcggtacaggcagacgcgtaataaatgagagcatcgcccaaaataatttactcatttgatttttactccaatacccgaaaccaccagccatacttcatttgccgcagcggccaactgctgatttacccgcccggcaatatcacgaaaatgtcgtgccagacgactctccggcacaatccccattcccacttcgttagtcactaatacaacctttgcggggcaacgttggcaggcagcaatcaacgactgaatctcagcattaatcgcctgttccatcgcctgataatcccattcatcagggtctttatcgccgccataatcaaacaacagattagtcaccattgtggtaacgcattcaagcaacacaacctcattcgggttaatgtctgcatgaattaattcatcaagatgttgccagcgctccactgtgcgccagtgctccgggcggccttgccgatgatgttctatccgtgcagccatctcatcatcaaggatttgcgaggtagcgatatacagaacctgtgaagagtccccaataagcgcctctgcgtggcgactcttcccgctccgtgcgccccccgtcaccaaaatcatcataccgactcctgattcaaatgtatgatggtattcattgaacagaacaatggatcccccaccgttgctgaccgcaaaacatttacgcgattaatactgcgcgtaatataattaaaaatccagcattctcaatccattacgaaataagatggcattacggaatagccagactttctcgtgttaacgtccgacaaaatgcgtcattgacagcggtttctgtggattgacacatttcattcagataatgaattaatgctactgccggaacaaccagcaaacgggcattgtgttctgaaatccaggctattgattcaacgtcagcgacagatctgcgctgtaaaagaacttgtaaaacaacgtaatagaattatccggaatggtggcgactatgcactagggaaggtgcgaataagtggggaaattcttctcggctgactcagtcatttcatttcttcatgtttgagccgattttttctcccgtaaatgccttgaatcagcctatttagaccgtttcttcgccatttaaggcgttatccccagtttttagtgagatctctcccactgacgtatcatttggtccgcccgaaacaggttggccagcgtgaataacatcgccagttggttatcgtttttcagcaaccccttgtatctggctttcacgaagccgaactgtcgcttgatgatgcgaaatgggtgctccaccttggcccggatgctggctttcatgtattcgatgttgatggccgttttgttcttgcgtggatgctgtttcaaggttcttaccttgccggggcgctcggcgatcagccagtccacatccacctcggccagctcctcgcgctgtggcgccccttggtagccggcatcggctgagacaaattgctcctctccatgcagcagattacccagctgattgaggtcatgctcgttggccgcggtggtgactaggctgtgggtcaggccgctcttggcatcgacaccaatgtgggccttcatgccaaagtgccactgattgcctttcttggtctgatgcatctccggatcgcgttgctgctctttgttcttggtcgagctgggtgcctcaatgatggtggcatcgaccaaggtgccttgagtcatcatgacgcctgcttcggccagccagcgattgatggtcttgaacaattggcgggccagttgatgctgctccagcaggtggcggaaattcatgatggtggtgcggtccggcaaggcgctatccagggataaccgggcaaacagacgcatggaggcgatttcgtacagagcatcttccatcgcgccatcgctcaggttgtaccaatgctgcatgcagtgaatgcgtagcatggtttccagcggataaggtcgccggccattaccagccttggggtaaaacggctcgatgacttccaccatgttttgccatggcagaatctgctccatgcgggacaagaaaatctcttttctggtctgacggcgcttactgctgaattcactgtcggcgaaggtaagttgatgactcatgatgaaccctgttccatggctccagatgacaaacatgatctcatatcagggacttgttcgcaccttccctagaacaccacaatttcgctctctcggtaaggcactgtcacagcattcaacagaatgtgacttgccagatttattagcgccaccagatgtttaaccgggtaaccacgacccagtcggggatatattccatcttctcgctgacatcatcaagaataaaaaggtttatcacactcagagcaacgttcttcagcaggcgggataattcttcaacatttagaagatgtgttattaaaggcatacaaactggacgtattgtattttcttttggtggttgacctaaggtagcagtttatcctgatgcgctgagatttctgtaatatctacgtcaacattctcctcgaatagaaaatgcagccccggcaagtgattcacattttttaacaaaacgttgttagcgtgccattttcagaagctctccaagaaagcgaattcttttctcaaattctgcattctcagacacagctttctactccatggtaatggcccaaatacgaagttgctcaggatcattagtggtgctgagaagttaaataaccatgcggagtaccactcgtcatcacgtatttatatatcatgaagctattgttgtgttttgtacatcagtagatatattctgatatactccttttgctagacataacctttcacctgcttgcaaagcttctgtgttctgacattgccaaattgttgcaattctgtatccagccttctttcagtcatagcttcgggccgcgataagactcactgatctgaccctgattcctcttgcagactttatagaccaattaaaatgcagtttctgcaggtcaacgtctgaccatcattgtcatcactctggccattagagtaaccttctgcattcatccttttgtaaaaagtttatattagtatcagcaattaaccggacctgatactgatatgagtcttaccgcatatacggtcaatttcagcaattaattacattatccacgccaaagtatttgtcatcacaatgatggtaccttctttcagacaccattttttcaactccgttttccacggaccgcactcttatgtcaagagtgcggtccgtggatacaaccagagaccgactgacacgagtcagaggaaacgacggatatgttcagtcgtaaaatatctatcaaaaaacatgattaaggtcaaaaatgtttgatatttacaatttatgaagatgacaataattatagatatatgagaacataaatgaaaataattatcattacagtaatcatttgtactttgtattaatgagggatgaaatgttatataatataccttgtcgaatttatatcctttccactctgtcattatgcatttctgggatagtttctactgcaaccgcaacttcttcagaaacaaaaatcagcaacgaagagacgctcgtcgtgaccacgaatcgttcggcaagcaacctttgggaaagcccggcgactatacaggttattgaccaacaaacattgcagaactccaccaatgcctccatagccgataatttgcaggacatccccggagtagagataacagacaactccttggcaggccgtaaacaaatccgcattcgtggctggatttgcccctatatttccagacatctgttatcacttaacccattacaagcccgctgccgcagatattcccgtggcgagcgataacccagcgcactatgcggatgccattcgttataatgctcgaacgcctctgcaaggttctttgctgccgttaacccgtctggtttgggcatgatactgatgtagtcacgctttatcgttttcacgaagctctctgctattccgttactctccggactccgcaccgccgtgttcttcggttcaagtcccaacatccgggcgaactggcgtgtttcattagcccggtagcatgaaccattatccgtcagccactccactggagacgacggaagatcgttgccgaagcggcgttccaccgctcccagcatgacgtcctgtactgtttcactgttgaagccgccggtagtgaccgcccagtgcagtgcctcacgatcacagcagtccagcgcgaacgtgacacgcagtctctctccgttatcacagcagaactcgaacccgtcagagcaccatcgctgattgctttctttcacggccactctgcctgtatgtgcccgtttcgatggcggtacagcaggttttcgctcaagcaacagcgcattctggcgcatgatccggtaaacacgtttggcattgatcgcaggcataccatcaagttctgcctgtctgcgaagcagcgcccatacccgacgataaccatacgttggcagctctccgataacatggtgtatacggagaagcacatccgtatcatcagtgtgacgactgcggcggccatccatccagtcatcggttcgtctgagaatgacgtgcaactgcgcacgcgacacccggagacaacggctgactaagcttactccccatccccgggcaataagggcgcgtgcgctatccacttttttgcccgtccatattcaacggcttctttgaggagttcattttccatcgttttcttgccgagcaggcgctggagttctttaatctgcttcatggcggcagcaagttcagaggcaggaacaacctgttctccggcggcgacagcagtaagacttccttcctggtattgcttacgccagagaaataactggctggctgctacaccatgttgccgggcaacgagggagaccgtcatccccggttcaaagctctgctgaacaattgcgatcttttcctgtgtggtacgccgtctgcgtttctccggccctaagacatcaatcatctgttctccaatgactagtctaaaaactagtattaagactatcacttatttaagtgatattggttgtctggagattcagggggccagtctagtggcgaagcatcctcccgtgttttaattctcattgatggtcaggaggtaacttatcagcgcgccggagataattatggtgtgggactgttgatagatgagtctgcgctggagcgtgttgaggtagtgaaaggtccatattccgtactgtacggttcacaggcaattggcggtattgttaacttcatcaccaaaaagggtgaatctccggactccctatatcacttaaattgatacaactttttagagtagtcattagtgaacagataattgataactcagaaccagtaaaatgcaaaagacgcaccacgctgggaaaatcgctgctattcagcagagttttgtatcgagaatggtggccagccacttattgctctcgcgtaagcgggtaccgtgacattctgcctgaacttgacctggtactgtggctgattaaagccgatgaccgtgccctgtctgtggatgagtatttctggcgacacatcctgcagtgcggacatcagcaggtgctgtttgtggtgacgcaggccgacaaaacggagccctgccatgaatgggatatggccggtattcagccttctcctgcacaggcacagaatattcgcgaaaaaacggaggcggtattccgtctgttccggcccgtacatccggttgtggccgtatcggcccgcaccggctgggaactggatacgctggtcagtgcgctcatgacagcgcttcccgaccatgccgccagtcccctgatgacccgactgcaggacgagctgcgcacggaatctgtccggtctcaggcccgtgaacagtttaccggtgcggtggaccggatatttgacacggcggagagcgtctgtattgcctctgttgcacgcacggttctgcgtgccgtccgtgacacggtggtctctgttgcccgtgcggtatggaactggattttcttctgaacctgtcgtgactgatgccctccctgactctgagtctgctcacaaaagcactgttttcgttactgtctctcttgtccgtgcaatagctcaataatagaataaaacgatcaatatctattttatcgatcgtttatatcgatcgataagctaataataacctttgtcagtaacatgcacagatacgtacagaaagacattcagggaacaacagaaccacaattcagaaactcccacagccggacctccggcactgtaaccctttacctgccggtatccacgtttgtgggtaccggcttttttattcaccctcaatctaaggaaaagctgatgaaacgacatctgaatacctgctacaggctggtatggaatcacatgacgggcgctttcgtggttgcctccgaactggcccgcgcacggggtaaacgtggcggtgtggcggttgcactgtctcttgccgcagtcacgtcactcccggtgctggctgctgacatcgttgtgcacccgggagaaaccgtgaacggcggaacactggcaaatcatgacaaccagattgtcttcggtacgaccaacggaatgaccatcagtaccgggctggagtatgggccggataacgaggccaataccggcgggcaatgggtacaggatggcggaacagccaacaaaacgactgtcaccagtggtggtcttcagagagtgaaccccggtggaagtgtctcagacacggttatcagtgccggaggcggacagagccttcagggacgggctgtgaacaccacgctgaatggtggcgaacagtggatgcatgagggggcgatagccacaggaaccgtcattaatgataagggctggcaggtcgtcaagcccggtacagtggcaacggataccgttgttaataccggggcggaagggggaccggatgcagaaaacggtgataccgggcagtttgttcgcggggatgccgtacgcacaaccatcaataaaaacggtcgccagattgtgagagctgaaggaacggcaaataccactgtggtttatgccggcggcgaccagactgtacatggtcacgcactggataccacgctgaatgggggataccagtatgtgcacaacggcggtacagcgtctgacactgttgtgaacagtgacggctggcagattgtcaaaaacgggggtgtggccgggaataccaccgttaatcagaagggcagactgcaggtggacgccggtggtacagccacgaatgtcaccctgaagcagggcggcgcactggttaccagtacggctgcaaccgttaccggcataaaccgcctgggagcattctctgttgtggagggtaaagctgataatgtcgtactggaaaatggcggacgcctggatgtgctgaccggacacacagccactaatacccgcgtggatgatggcggaacgctggatgtccgcaacggtggcaccgccaccaccgtatccatgggaaatggcggtgtactgctggccgattccggtgccgctgtcagtggtacccggagcgacggaaaggcattcagtatcggaggcggtcaggcggatgccctgatgctggaaaaaggcagttcattcacgctgaacgccggtgatacggccacggataccacggtaaatggcggactgttcaccgccaggggcggcacactggcgggcaccaccacgctgaataacggcgccatacttaccctttccgggaagacggtgaacaacgataccctgaccatccgtgaaggcgatgcactcctgcagggaggctctctcaccggtaacggcagcgtggaaaaatcaggaagtggcacactcactgtcagcaacaccacactcacccagaaagccgtcaacctgaatgaaggcacgctgacgctgaacgacagtaccgtcaccacggatgtcattgctcagcgcggtacagccctgaagctgaccggcagcactgtgctgaacggtgccattgaccccacgaatgtcactctcgcctccggtgccacctggaatatccccgataacgccacggtgcagtcggtggtggatgacctcagccatgccggacagattcatttcacctccacccgcacagggaagttcgtaccggcaaccctgaaagtgaaaaacctgaacggacagaatggcaccatcagcctgcgtgtacgcccggatatggcacagaacaatgctgacagactggtcattgacggcggcagggcaaccggaaaaaccatcctgaacctggtgaacgccggcaacagtgcgtcggggctggcgaccagcggtaagggtattcaggtggtggaagccattaacggtgccaccacggaggaaggggcctttgtccaggggaacaggctgcaggccggtgcctttaactactccctcaaccgggacagtgatgagagctggtatctgcgcagtgaaaatgcttatcgtgcagaagtccccctgtatgcctccatgctgacacaggcaatggactatgaccggattgtggcaggctcccgcagccatcagaccggtgtaaatggtgaaaacaacagcgtccgtctcagcattcagggcggtcatctcggtcacgataacaatggcggtattgcccgtggggccacgccggaaagcagcggcagctatggattcgtccgtctggagggtgacctgatgagaacagaggttgccggtatgtctgtgaccgcgggggtatatggtgctgctggccattcttccgttgatgttaaggatgatgacggctcccgtgccggcacggtccgggatgatgccggcagcctgggcggatacctgaatctggtacacacgtcctccggcctgtgggctgacattgtggcacagggaacccgccacagcatgaaagcgtcatcggacaataacgacttccgcgcccggggctggggctggctgggctcactggaaaccggtctgcccttcagtatcactgacaacctgatgctggagccacaactgcagtatacctggcagggactttccctggatgacggtaaggacaacgccggttatgtgaagttcgggcatggcagtgcacaacatgtgcgtgccggtttccgtctgggcagccacaacgatatgacctttggcgaaggcacctcatcccgtgcccccctgcgtgacagtgcaaaacacagtgtgagtgaattaccggtgaactggtgggtacagccttctgttatccgcaccttcagctcccggggagatatgcgtgtggggacttccactgcaggcagcgggatgacgttctctccctcacagaatggcacatcactggacctgcaggccggactggaagcccgtgtccgggaaaatatcaccctgggcgttcaggccggttatgcccacagcgtcagcggcagcagcgctgaagggtataacggtcaggccacactgaatgtgaccttctgacagaaccatcgcctctctgtggtcccggtcatcatgaccgggacccggaccggcgcaacggatcttcaacgccacattcgctggcattaacaataacatgatattcatcacggagtgactatgttacagatagtcggcgcgctgatcctgctgatcgcaggatttgccattcttcgccttttgttcagagcattaatcagcacggcttctgcgctggcagggctcatattgctgtgtctgttcggcccggccttactggctggctatatcaccgaacgcataacccggttgttccatattcgctggctggcaggcgtatttctgacgattgccggaatgatcatcagcttcatgtggggacttgatggtaaacatatcgcgctggaggctcacacctttgactctgtgaaatttattctgaccaccgctctcgccggtggtctgctggctgttcccctgcagatcaaaaacattcagcagaacgggatcacaccagaagatatcagcaaggaaattaacgggtattactgctgtttttatactgcctttttccttatggcgtgttctgcatgcgcaccattgatcgcgttacagtacgatatttcaccgtcactgatgtggtggggcgggttgttgtactggctggctgcattagtgacgctgctatgggcggccagccagatccaggcgctgaaaaaactgacctgtgccatcagccagacactggaagaacaaccggtgctcaacagtaaatcgtggctgaccagtttgcaaaacgattacagccttcctgactcactgacggagcgcatctggctgacgctcatttctcaacggatttcccggggagagctgagggaatttgaactggcagacggaaactggttactgaacaatgcctggtatgaaagaaacatggcagggtttaacgaacagttgaaagagaacctgtcattcacacctgatgaactgaaaacgctcttccggaaccgcctgaatttatcaccggaagcgaatgacgattttctcgatcgttgcctggacggcggtgactggtatcccttttcagaaggtcgccgttttgtatcattccatcacgtggatgagcttcgtatctgtgcctcctgcgggctgacagaagtacatcatgccccggaaaatcataagccggatccggaatggtactgctcctctctttgtcgcgaaacagaaacactgtgtcaggaaatttatgaacgcccttacaacagctttatttccgatgcaacggcgaatggtctgattctcatgaaactgccggaaacctggagtacaaatgagaaaatgtttgcttccggagggcagggacatgggtttgccgctgaacggggaaaccatattgtcgacagagtccgtctgaaaaacgcacggatcctcggtgataataatgccagaaatggagcagacagactggtcagcggaacagaaatccagacgaaatattgttcaactgcagcccgtagcgtcggtgcggcattcgacggacaaaacggacagtatcgttacatgggaaataatggccccatgcaactggaagtcccccgtgatcagtatgccggcgctgttgaaaccatgaggaataagatccgcgaaggtaaagtagaggagagatgacgcccggcgagcgcagcctcattcaacgggccctgaaaaccctggaccgccatcttcatgaacccggcgtggccttcacctccacccgtgcagcacgggaatggctgattctgaacatggcgggactggagcgtgaagaattccgggtgctgtatctgaacaaccagaatcagctgattgccggtgaaaccctcttcaccggcaccatcaaccgcacggaagtccatccccgggaagtgattaaacgcgccctgtaccacaatgccgctgccgtggtactggcacacaatcacccgtccggtgaagtcacacccagtaaggcagaccggcttatcaccgaacgtctggtacaggcactgggcctggtggatatccgggtgccggaccatctgatagtcggtggcaaccaggttttctcctttgccgaacatggtctgctttaacccttcacaaccacatcacacctgttttcacttttatcttctgtcttcagaggtatcccattatgaaaattatcacccgtggtgaagccatgcgtattcaccaacaacatccgacatcccgtctttttccgttctgtaccggtaaataccgctggcacggcagtgctgaagcgtataccggtcgtgaagtgcaggatattcccggtgtgctggccgtgtttgctgaacgccgtaaggacagttttggtccgtatgtccggctgatgagcgtcaccctgaactgagtgggaattctgatgagcagaattatcgccactaccggaccattcttagccgattttctgtaaggattttatcgtgtcagacacactccccgggacaacacttcccgacgacaatcacgaccgcccctggtgggggctgccctgcaccgtgacgccctgtttcggggcacgtctggtgcaggagggtaaccggttgcattaccttgccgaccgcgccggtatcagaggcctgttcagcgatgcagatgcgtaccacctggaccaggcctttccgctgctgatgaaacaactggaactcatgctcaccagcggtgaactgaatccccgccatcagcataccgtcacgctgtatgcaaaagggctgacctgcaaagccgataccctcagcagttgtgattacgtttatctggctgtttatccgacgcccgaaatgaaaaattaactctccagaatagccttctgctacggcctggtgttttcaccacgccacttttccatttttatatctgcatatcaggaaaatcttcagtatgaaaacattacctgtattacccgggcaggcggccagttctcgcccgtctcctgttgaaatctggcagatactgctgtcccgactgctggaccagcactatggcctcacactgaatgacacaccttttgccgatgaacgtgtgattgagcagcatattgaggcaggcatttcactgtgtgatgcggtgaactttctcgtggaaaaatacgcgctggtgcgtaccgaccagccgggattcagcgcctgtacccgctctcagttaataaacagcatcgatatcctccgggctcgcagggcgaccggcctgatgacccgcgacaattacagaacggtaaataacattaccctgggtaagtatccggaggcgaaatgatgacactggaagccgacagcgttaacgtacaggcgctggatatggggcacattgtcgttgacattgatggtgttaatatcactgaactgattaataaggccgctgaaaacggttattcactccgcgtggtggatgaccgtgactctaccgaaacaccggcaacttatgccagccctcaccagttgctgtaagacaatgcagtgatacagggtatagtgccattaaccacagaaacagcactgttgtcctgtattaagcaggcaagagaagatgtccttaccctgcgccatctgcagcttctgcaccagaaccggtgaatctcactcaacaggcttcatttctcctgacgccagcctgaatacagctggcgttttcatttataaacagaaaggaaaaccgataataatggaatggacgccccgaccatgaagcaacggtaggatattactgataaaccttccagtggaggtgcgttatggccgttttaacgattagcattgacctgacaaaaaatgaattccaaatccacggtctgggtaggaacagaaaaatctaagctcagaaaacggattaaagtaagcgtcaacggagcaccgtattgacgcttatttattggtgagaactacgttccatggcaggagttcgtcaacacggttggagggccattccggcagtatgctcagaatatggcgcagatacgcttccggatcgataccgttcagacggcaggtgcctgcttttctggcaacaagcaggaatctcagcgctgaagcaggaattagaggtaaaaacgccctaccgggccatgaatcacccggtcattggagtagtaaccaaagcagatttagccagcatggaacaaatatctttggtgaaaagttggttacgggaagctggagcgcacaacgtgttagtaaccagtgcagttaataacaatggagttacagaactttttgccttgctgcatacagaagaaggctgttgttaatttcgattggttctcggatgagaatgatgacggtgatacacagataagaatcaatgagcaatgagggttgccgggcaaccctcattgaataaaacgggaattacttcgcttcgccgtttttcatttcgcccatagctttcagctttttggagatatcgcggcgttctttggagagctcggcatttttgatgatgtaatcgtcaacgcgatcttcatagtcacctttcatgctggcgatgatgccctggattgcttcaacgctcatccccggcttgatgtaatcgctcaggttgtccagcagcaggacgcgcttctggttgtcacggatctttttctcaacgtcctgaatttcacgttgcagtttgttcttacgacggaacagacgaacaaattccagtacgtcctggaatgaaggcttggtagtttccatttttatacccctgataatgtgagagtcggattcgtttaagcaaccgctattcgttagggccaacattactcatagctgccgcagatgacaatgcttttatcccttttcactatcataccctttatccttgctgaatcgaagcagcagcaagatgattctgaagttcaggaattatttgcgcaaggcccggcaaatcagattcgatagcaactcaagctgatgcgccgtttccatgttcagccacacataaccatagattggtgtttccacaaccttcaggtcatggtggttattgagcaactgacgcagctcttccacagcatcgttcaatttttccgtattggcaaaaaccggctgcggattaccttcgtacagcgcatgaacaaggctcagcagtatttgctgcatcatgtgctgggtatcacgaagtttttgcgcgttcaataacacgaaatggctggggcgcgtggcccagtatgcattgatttgcaactccagcatacaaaccagattgcggttaatggtctggataccttcatatatcgattttggaatacgggtttctttgctggcgggcgcaatcagtccacgcattttcacggcatcggtcaggagtttttgtagatggctttccagacgtgggcgttcgagtaagttcggtgagaatgcagattgatagacccgattatactcggtcagacttttcgccagttgaatgcgccagtggatgaacgcccgttgtggccagataccggtaaacaacattgccagtaaagagccgaggatcacatcgccgcttcgccataacgccgtatcaatttcacctgtcggggaacccacaacaattgccagcgtcaccccaatcaataaaccttgatacggtttcttgcccagcgccagccaaccgcaaaggaacatggccgccgcgcaccagactaacatcagcggtaacgagattaactccagttgcagagcgataagacctaaaatcgaacccaacaccgtaccgccaatacgctcaaaggcgcgagggacaacgttaccccagaacgagattggccccataatcaccaccatggtgaccagcggccaggtgctttccgggatagtaaacaggcggataatgagaaaagtgagcaggaatgccagcgcgacccgagtaccatgcacaatgcggtaatggcggtatacccggatttcaaacgggcttaatgacttatcggcacgcacgcagaaactccgtaatgagattaaaagcgctcataactcatctgtcggccagaaggcgcgcctctgaattatccgacggacaaaccgggaacagtgtaatttcccggcaggagcgaaaaaattgaaaggcgcatcttactcttttcgctttcaaaaaaaagagtggtcatcgcgttaacacaccgccctgagatgaattagtgatgttttggctgcaccgcaacatacatttcgatatcccagtacccatcttccgcgccattgttcaaataaacctcgaagcagggctttggtaacatttcataagcactgtcctgcaagagactattaaagaactgataccagggtttagcaaaatcatcaccgactacacgagctaccgccaccgcatactgaccacctgtaatttctgtcagaatgacgccctcactgttttcgggaagcgtaaagtaacccggcaccgtcacgacggtgtcgcagcgtaatttttcggcgggtgtttcatctggattgtcgtaatagacagcaacccactccttcggcacaatatttttgctatctacccacatcatcaactgctcaaagcctttctttaccgtctgttcccacgggccaacgagatggaaacctgcaacggtacgtttctcttcctgcttaatctcgtagttcatgacgcctccattgatactgtttttatatacagtatagttgcaaaattaaaaccacaaggaatgagtgttgattatgcgagcagactcgcactcctgccagtctgctgcaaaagaaaggtcaggccttatggtggaaataatcactcaggcgagaaaacatgctgccttccccgacagattccagggtaaccagcggccagtgcgccacctgtttatcacggtcgtaaagttcaatttcccctacccgctgatgggcgctaattggcgcggtgagttctttaccatcaagggtatatttggctttgatatgtggaatttcggctttcggtagcaccatccagaactcttgttccgttcccaggtcgatattttctttatcgccataccagatgcgttccgttccgacctttttcccacggtgcaaaatttgcaccgtagtaaagttttgttgcccccaacgcagtaattttcttgcctcttcctcacgaccttttgcactgtcagcccccattaccactgcaatgagacgacgctgcccatctacagccgaagcaatgagattaaacccggcaccagaagtatgacccgttttcaggccgtcaacattcatggttttatcccacaacaacccgttacggttttgctgggtgataccgttccaggtgagacttttctcactgtacatatgataaaactcgggctcgccgtggatgatagcacgagaaagcacagctaaatcataagccgagctatgctggccaggtgcatccagaccatgcactgtttcaaaatgcgtatccttgagatgcagcttctcggcatagttgttcatcatttcaacaaactgccgttgcccaccggcaatatagtcagccagagcaacacaagcgtcatttccggaatccacaattaaaccacggcttaaatcacgtaccgatacgcgatcgccctctttcaaaaacatcagtgaagaaccgacaaacaccggattatctttcgcccacgcatcgcgccccacggtgacaatatcgtctggcgtaatgcgatgactatcgatagcgcgatccacgacataacccgtcatcagctttgtcaggctggcgggattgcgctgttgatgctcattacccgcggtgaggatctgaccggtggtgtaatccatcaatacccaggacccggcatgaatctctggaggctgaggtgaaaaaggaatgttttccgccgcaaaaccagacgataagttaaaaacgaacaaagaagcagcaataataagacggcgtttcaacagcaaaccctcaggagtttcaaatagctgttctttttacggaaatacttatgaactggctggaataaagtgcaagaaaatgtgactaccctctcatttttatctgacatgatctgttgccactcgctgccaaattgtggcgctaaagctgattagcacggtgatatttgatactctggcagacagcagaaataacggatttaacctaatgatgaatgacggtaagcaacaatctacctttttgtttcacgattacgaaacctttggcacgcaccccgcgttagatcgccctgcacagttcgcagccattcgcaccgatagcgaattcaatgtcatcggcgaacccgaagtcttttactgcaagcccgctgatgactatttaccccagccaggagccgtattaattaccggtattaccccgcaggaagcacgggcgaaaggagaaaacgaagccgcgtttgccgcccgtattcactcgctttttaccgtaccgaagacctgtattctgggctacaacaatgtgcgtttcgacgacgaagtcacacgcaacattttttatcgtaatttctacgatccttacgcctggagctggcagcatgataactcgcgctgggatttactggatgttatgcgtgcctgttatgccctgcgcccggaaggaataaactggcctgaaaatgatgacggtctaccgagctttcgccttgagcatttaaccaaagcgaatggtattgaacatagcaacgcccacgatgcgatggctgatgtgtacgccactattgcgatggcaaagctggtaaaaacgcgtcagccacgcctgtttgattatctctttacccatcgtaataaacacaaactgatggcgttgattgatgttccgcagatgaaacccctggtgcacgtttccggaatgtttggagcatggcgcggcaataccagctgggtggcaccgctggcgtggcatcctgaaaatcgcaatgccgtaattatggtggatttggcaggagacatttcgccattactggaactggatagcgacacattgcgcgagcgtttatataccgcaaaaaccgatcttggcgataacgccgccgttccggttaagctggtgcatatcaataaatgtccggtgctggcccaggcgaatacgctacgcccggaagatgccgaccgactgggaattaatcgtcagcattgcctcgataacctgaaaattctgcgtgaaaatccgcaagtgcgcgaaaaagtggtggcgatattcgcggaagccgaaccgtttacgccttcagataacgtggatgcacagctttataacggctttttcagtgacgcagatcgtgcagcaatgaaaattgtgctggaaaccgagccgcgtaatttaccggcactggatatcacttttgttgataaacggattgaaaagctgttgttcaattatcgggcacgcaacttcccggggacgctggattatgccgagcagcaacgctggctggagcaccgtcgccaggtcttcacgccagagtttttgcagggttatgctgatgaattgcagatgctggtacaacaatatgccgatgacaaagagaaagtggcgctgttaaaagcactttggcagtacgcggaagagattgtctaatttgaagcctccgccgctggtacggcggaggacaatgttgagtcaggctttttgaacggtgatgctccacgctgcatcgccaatctgctgataatcggtgatggcatgtccttcttctgccgcccactgtgggattgcttcagttgcctgggtgcaatcaaactcaatcactaactcatcgccgctgaccatttctgccagagctgcttttgcttctatgagtggaaacggacagacctgcgtcaccacatccagctttttaatcaccatctttacaccttacttaatttgccgcagcagttgccagtcgcgccttacgctgcggtcgaacatacacaagccaggacgcagtccagactccgagaatcataaatacaaggccaatccagccctgccaggtcatcattgcagtcataaccagtccattaccgatagagcaaccacctgcaatactggcaccgaagcccatcagtacaccacctaacccgctacgtaatgttgtttgtgcatcagctgcgcgaacgcggaactcacggctcgctttggctgcaataaatgaccccacgaagatccctaacaccaggaaaacgccccagttaatgtatttcatgtcacccgcgaccagaaattgcagaatattggccgttggggaagtgattcctaacccaaacatgcgtccggttgcttcactcaggggccaggctaaaagcgcaatcaaaccgatgagtacagctgtgacaaagggatgccagcgtttttcaaacagaatatgagcgatcccggttcggcgcggcggtaaggtcgcgactttgagttttggcttcttcaactctttcatcaccacccagagcgttatcaccagcaaaacggcaaccaacggccacacagacaaattaaaagtctcagcaatagagttatgttcagtactgtagtgctgcaaggtttgatttaaaccactggcatgtggagaacgcatcaccgcactcatcaccatataagtgaaaagcgcgatccaactgccgatcaatccctcacccgcgcgataccaggtcccggtggcacatccacccgccagaacaattcccagcccgaagatatacccacctataacagtaccaagccacgggaacgccccggcttcgtaagtcagtaggcccgcctgaattaacgcaaaaacccccacgctttgtaccgaaattgcaatcagcaaggcgtaaaacatgcgattatttttcacgatatacatatcgcgaaaaccacctgtcaggcaaaaacgcccacgctgcatgacaaatcccagcagagcaccacaaattagcccgcttaatatcattgaaaacataaattaattaaccagatgaatgttaatgaggaaattattcatgactggtggaatgcagaccaataaccaaattctctaaattagaacaaatggttattaatgaggagttcgatacaaaagaataaaaaaaccggagccaaatgttcattcgactccggtttattattagaaaagatgattatgctacgtcttcgtactgcggaaccggattacggaagctcttggtgacgcaagccaggtaaatcagaccgatagcagcccagatcagacccagaaccattgagctttcttccaggttaacccacagcgcaccaacggtcagcgcaccacacatcggcaggaacagatactggaagtgatctttcagcgtcttgttacgcttctcacggatccagaactgcgagatgaccgacaggttaacgaaagtgaacgccaccagcgcaccaaagttaatcagcgccgttgccattaccaggtcgaagttgattgccagcagggcaatcgcgccaaccaggatgatgttcatcgccggagtacgccatttcgggtgtacataaccgaagaagcttttcgggaatacgccgtcacgacccattacgtacatcagacgcgctacgcctgcatgcgccgccataccggacgccagtacggtaatggtggagaagatcagcgcgccaacctggaacgctttacccgcaacgtacagcatgatttcaggctgtgacgcatccggatctttaaagcgagagatatccgggaagtacagctgcaggaagtaagttgcaaagatgaagatcatgccgccgatcagcgcggtcaggaaaatcgcacgcgggatcacgcgctctgcatctttggtttcttccgacaggttgctgatgccgtcaaagccggtaaaggagaagcacaggattgtcgccccggtaatcatcgggataacatgcgcatcgccagaccagaatggacgagtgctcgccagcgtaccagcgccttcaccttcaaatacgccataaacaaccatgcccagaatcaccgcgatcagcactacctgcaacacgacgattacagtgttgaagttcgctacggatttcagactacgcaggttaaaggcggtcataaaggccaccagcgccaccacaaacatccacgatgggatggaaggcaccagagcttcaaaatagattttcgccagtagaatgttgatcatcggcgcgaacagatagtcgagcagagaagaccaacccaccataaagccgacagtcgggctaatggatttctgggcgtaagtgtatgcagagccagcagaaggatagcggcgaaccagcttcccgtagctcagagccgtaaacaggatcgcaatcaatgcgaacgcataggctgtcggcacatgaccatccgtgaggcctgaaacgataccaaaagtatcaaacagcgtcatcggctgcatataggcaagacccatcattacaaccggaactaacgtaagcgttttacgcaattccacgcgagaggtgtttggagtaacgttatgcgacatggtcattctcctttacggtgataaccgtcgcgtaagcaaaaaattgccccatttttttggattcctcagcgacaacaactgtcgatttttagtaaatatctatccggtacgaagcccggcctcttggtatgaatgattggtttgaagcaaaaaataaccgacgctgatgaaacgtcggtttttagtcattttttgacagcggcgcattgtgcctaaatgggggggaaatgacaagagaatgagaggcttgtcagaataatttttctttaaatggctgattttccgtcatcagattttgcataaacaccggcgatcgcactatttgctaaaatttcatcccgccaccagccactggcaagtcctgcggtctgttcgttccagccaatccagacgggttcaaagagagtttgggcgaccactttcttctcgattaacgcgccactatcgagaaaacgttgcgccagataacggggtaaatagccgcagccgaggccgctaatttgcagctccagtttggttttaaaatcgaaaacggtaatggcttcttgttcgtcgagaagttgtgatgccgtagaagcgcctgcctgcgcagtatcccccaccacaatcgcccgatatcgcttaataatacgacgatttaacggctcttcttccagggctaacggatgatgaggcgcgaccgcaaagacttgttccagatcgcccaaccgtgaaaaaccaaactcactggaagatggtggctcatgcatcgcgccaacaataatatccgctcgcccctgagtcagggcatcccatgaaccaccgagtacgccattgataaacttcaggcgcgtcacgctatgatgttgataaaaagcttcaatgagtggcgcaagcagagaaaaaggaaacgtgtcgtccacgccaatcaccagctcgttttcccagccttcatgcagtttgatcgcctgcttttccagttcccgcacggtatgcagaacttcccgccctttctctaataacatttttccggtgcgggtgaatttagcgcggtgtccgctacgatcaagcaattgaatattaaggtcgctttccagcttgtgaacggtgtaactcagagcggacggcgtcttgtagagtttggccgacgccgccgcaaaactgccttctttttctaaggcatcgaggatcatcaacacatccagcagtggtttcatacacgcccccttgcagtgcatgcggcgtcctgctggcgtgatcgtttactccagcggcattaccagcggatcgggatactggtattcaaatcccagttcattacaaatccgactgccatcaataatcttacctttgccgctgtccagactatttctgaactgcggaggttccagccccagtaaacgggccatctgcggatagaaaacattacgcgcagggtgagctggcgcacatatattatagatgtgtccgcctttaggtgcctgtaacaacagagtgatagcgccaataacatcttctaaatggactaaattaacaccatgttcaccatcaggcgcggtttttccggcaaagaagcgtccgggatgacgtcccggtccgaccaggcccgcaagacgcagaatatcgaccgaagtaccgggtaaattgtgcagccagtcttcgagttcttctaatactcgtccactgttggttactggattacgcggggtggtttctttcaccgtgccttgcgcgtcgccatagacagatgttgagctggtaaaaataatgcggggaatacgatgggccagcgcgctatccactaactcttgtaccgcttgtaaatagaactcatcgccggggccgctacgacgtgccggaagcgtaatgaccagcgcatcggcatccatcagggcatccagatcgtcagaatcgcaaactagctcaggctccatgcgaagcagatagctatcaatgccactcattcgggccgcttcgacaccatcttgtgtggttttactcccggtgacttgccagcctcgcgctgaaagtgacatcgccagcggcatgcctaaccaccctaacccgacaattgcgacctttttcatccgttatctcctgatacaccttagatctataaggctacgctagcgtatcaaaactgacaattcattctatgaatgaatctgttcaataatgataacgacatgctgcaatgagcagtgaatcgtcggtaaccgcgtataccagacggtgctcctctgtaatgcgtcgggaccagaaacctgacaaattatgtttcaggggttctggcttccccttaccttcaaatggcgttctgcgggtatctttgataagttcattgatctttttaacaattcgcttatctgtttcctgccagtacagataatcgtcccatgattcctcagaccagattagtttcactcaatgatgtccttttccgttcctttgcctgatttcaggctatcgattgagtccatcaatctccgggcgttagcgggggagcgcagtagataagccgtctcttccagcgagttgtattcttcgagtgacatcagaacacaagcctctccattctgacgagtaataaggatcggggcatgatcttcaacggctttcatcattgttgccgacaaattctgacgcgcttcgctgtagctaattgtacgcatgtcaatctcctcttttgtacagttcattgtacaatgatgagcgttaattaactatttattaattagtttgtagatcaaggtattgtcagtgagacgaaaatccaggcttcgctatttttggtgccatcagctaagaggacagtcctcttagccccctcctttccccgctcattcattaaacaaatccattgccataaaatatataaaaaagcccttgctttctaacgtgaaagtggtttaggttaaaagacatcagttgaataaacattcacagagacttttatgacacgcgttcaatttaaacaccaccatcatcaccatcatcctgactagtctttcaggcgatgtgtgctggaagacattcagatcttccagtggtgcatgaacgcatgagaaagcccccggaagatcaccttccgggggcttttttattgcgcggttgataacggttcagacaggtttaaagaggaataacaaaatgacagacaacactcgtttacgcatagctatgcagaaatccggccgtttaagtgatgactcacgcgaattgctggcgcgctgtggcattaaaattaatcttcacacccagcgcctgatcgcgatggcagaaaacatgccgattgatattctgcgcgtgcgtgacgacgacattcccggtctggtaatggatggcgtggtagaccttgggattatcggcgaaaacgtgctggaagaagagctgcttaaccgccgcgcccagggtgaagatccacgctactttaccctgcgtcgtctggatttcggcggctgtcgtctttcgctggcaacgccggttgatgaagcctgggacggtccgctctccttaaacggtaaacgtatcgccacctcttatcctcacctgctcaagcgttatctcgaccagaaaggcatctcttttaaatcctgcttactgaacggttctgttgaagtcgccccgcgtgccggactggcggatgcgatttgcgatctggtttccaccggtgccacgctggaagctaacggcctgcgcgaagtcgaagttatctatcgctcgaaagcctgcctgattcaacgcgatggcgaaatggaagaatccaaacagcaactgatcgacaaactgctgacccgtattcagggtgtgatccaggcgcgcgaatcaaaatacatcatgatgcacgcaccgaccgaacgtctggatgaagtcatcgccctgctgccaggtgccgaacgcccaactattctgccgctggcgggtgaccaacagcgcgtagcgatgcacatggtcagcagcgaaaccctgttctgggaaaccatggaaaaactgaaagcgctgggtgccagttcaattctggtcctgccgattgagaagatgatggagtgatcgccatgagctttaacacaatcattgactggaatagctgtactgcggagcaacaacgccagctgttaatgcgcccggcgatttccgcctctgaaagcattacccgcactgttaacgatattctcgataacgtgaaagcacgcggcgatgaggccctgcgggaatacagcgcgaagtttgataaaaccacggttaccgcgctgaaggtgtctgcagaggagatcgccgccgccagcgaacgcctgagcgacgagctaaaacaggcgatggcggtggcagtaaagaatattgaaaccttccacactgcgcaaaaactgccgccggtagatgtagaaacgcagccaggcgtgcgttgccagcaggtcacgcgtccggtagcttcagttgggttgtatattcctggcggctccgccccgctcttctcaacggtattaatgctggcgactccggcgagtattgcgggctgtaaaaaagtggtgctgtgctcaccgccgccgattgccgatgagatcctttatgcggcgcagctgtgcggtgtgcaggacgtgtttaacgtcggcggcgcacaggccattgccgcactggcgtttggtacggaatctgtgccaaaagtggacaaaatcttcgggccgggtaacgcctttgtcaccgaagcgaaacgtcaggtgagccagcgtctggacggtgcggcgatcgatatgcccgcaggcccgtcggaagtgctggtgattgctgacagcggcgctacgccggatttcgtggcttctgatttgctctctcaggctgaacacggcccggactcacaggtgattttactgacgcccgctgctgatatggcgcgtcgcgttgccgaggccgtcgaacgccaactggcagaactgccgcgtgccgaaaccgcccgccaggcactgaacgccagccgcctgatcgtgactaaagatttagcgcagtgcgtggagatctccaaccagtacggcccggagcacctgatcattcagacccgcaacgcccgtgaactggtcgatagcatcaccagcgccggttcggtatttcttggtgactggtcaccggaatcggcaggtgattacgcctccggcaccaaccacgttctaccgacttacggttacaccgccacctgttccagcctcgggctggcagatttccagaagcgcatgaccgtacaggaactgtcgaaagaggggttctccgcgctggcttcaaccatagaaacactggccgccgccgagcgcctgaccgcccacaaaaatgccgttactttgcgtgttaacgcccttaaggagcaagcatgagcaccgtgactattaccgatttagcgcgtgaaaacgtccgcaacctgacgccgtatcagtcggcgcgtcgtctgggcggtaacggcgatgtctggctgaacgccaacgaataccccactgccgtggagtttcagcttactcagcaaacgctcaaccgctacccggaatgccagccgaaagcggtgattgaaaattacgcgcaatatgcaggcgtaaaaccggagcaggtgctggtcagccgtggcgcggacgaaggtattgaactgctgattcgcgctttttgcgaaccgggtaaagacgccatcctctactgcccgccaacgtacggcatgtacagcgtcagcgccgaaacgattggcgtcgagtgccgcacagtgccgacgctggacaactggcaactggacttacagggcatttccgacaagctggacggcgtaaaagtggtttatgtttgcagccccaataacccgaccgggcaactgatcaatccgcaggattttcgcaccctgctggagttaacccgcggtaaggcgattgtggttgccgatgaagcctatatcgagttttgcccgcaggcatcgctggctggctggctggcggaatatccgcacctggctattttacgcacactgtcgaaagcttttgctctggcggggcttcgttgcggatttacgctggcaaacgaagaagtcatcaacctgctgatgaaagtgatcgccccctacccgctctcgacgccggttgccgacattgcggcccaggcgttaagcccacagggaatcgtcgccatgcgcgaacgggtagcgcaaattattgcagaacgcgaatacctgattgccgcactgaaagagatcccctgcgtagagcaggttttcgactctgaaaccaactacattctggcgcgctttaaagcctccagtgcggtgtttaaatctttgtgggatcagggcattatcttacgtgatcagaataaacaaccctctttaagcggctgcctgcgaattaccgtcggaacccgtgaagaaagccagcgcgtcattgacgccttacgtgcggagcaagtttgatgagtcagaagtatctttttatcgatcgcgatggaaccctgattagcgaaccgccgagtgattttcaggtggaccgttttgataaactcgcctttgaaccgggcgtgatcccggaactgctgaagctgcaaaaagcgggctacaagctggtgatgatcactaatcaggatggtcttggaacacaaagtttcccacaggcggatttcgatggcccgcacaacctgatgatgcagatcttcacctcgcaaggcgtacagtttgatgaagtgctgatttgtccgcacctgcccgccgatgagtgcgactgccgtaagccgaaagtaaaactggtggaacgttatctggctgagcaagcgatggatcgcgctaacagttatgtgattggcgatcgcgcgaccgacattcaactggcggaaaacatgggcattactggtttacgctacgaccgcgaaaccctgaactggccaatgattggcgagcaactcaccagacgtgaccgttacgctcacgtagtgcgtaataccaaagagacgcagattgacgttcaggtgtggctggatcgtgaaggtggcagcaagattaacaccggcgttggcttctttgatcatatgctggatcagatcgctacccacggcggtttccgcatggaaatcaacgtcaaaggcgacctctatatcgacgatcaccacaccgtcgaagataccggcctggcgctgggcgaagcgctaaaaatcgccctcggagacaaacgcggtatttgccgctttggttttgtgctaccgatggacgaatgccttgcccgctgcgcgctggatatctctggtcgcccgcacctggaatataaagccgagtttacctaccagcgcgtgggcgatctcagcaccgaaatgatcgagcacttcttccgttcgctctcatacaccatgggcgtgacgctacacctgaaaaccaaaggtaaaaacgatcatcaccgtgtagagagtctgttcaaagcctttggtcgcaccctgcgccaggccatccgcgtggaaggcgataccctgccctcgtcgaaaggagtgctgtaatgaacgtggtgatccttgataccggctgcgccaacctgaactcggtgaagtctgccattgcgcgtcacggttatgaacccaaagtcagccgtgacccggacgtcgtgttgctggccgataaactgtttttacccggcgttggcactgcgcaagcggcgatggatcaggtacgtgagcgcgagctgtttgatctcatcaaagcctgtacccaaccggtgctgggcatctgcttagggatgcaactgctggggcggcgcagcgaagagagcaacggcgtcgacttgctgggcatcatcgacgaagacgtgccgaaaatgaccgactttggtctgccactgccacatatgggctggaaccgcgtttacccgcaggcaggcaaccgcctgtttcaggggattgaagacggcgcgtacttttactttgttcacagctacgcaatgccggtcaatccgtggaccatcgcccagtgtaattacggcgaaccgttcaccgcggcggtacaaaaagataacttctacggcgtgcagttccacccggagcgttctggtgccgctggtgctaagttgctgaaaaacttcctggagatgtgatgattattccggcattagatttaatcgacggcactgtggtgcgtctccatcagggcgattacggcaaacagcgcgattacggtaacgacccgctgccgcgattgcaggattacgccgcgcagggtgccgaagtgctgcacctggtggatctgaccggggcaaaagatccggctaaacgtcaaatcccgctgattaaaaccctggtcgcgggcgttaacgttccggtgcaggttggcggcggcgtgcgtagcgaagaagatgtggcggcgttactggaagcgggcgttgcgcgcgtagtggtcggctccaccgcggtgaaatcacaagatatggtgaaaggctggtttgaacgcttcggtgccgatgccttagtgctggcgctggatgtccgtattgacgagcaaggcaacaagcaggtggcagtcagcggctggcaagagaactcgggcgtttcactggaacaactggtggaaacctatctgcccgtcggcctgaaacatgtgctgtgtaccgatatctcgcgcgacggcacgctggcaggctctaacgtctctttatatgaagaagtgtgcgccagatatccgcaggtggcatttcagtcctccggcggtattggcgacattgatgatgtggcggccctgcgtggcactggtgtgcgcggcgtaatagttggtcgggcattactggaaggtaaattcaccgtgaaggaggccatcgcatgctggcaaaacgcataatcccatgtctcgacgttcgtgatggtcaggtggtgaaaggcgtacagtttcgcaaccatgaaatcattggcgatatcgtgccgctggcaaaacgctacgctgaagaaggcgctgacgaactggtgttctacgatatcaccgcttccagcgatggccgtgtggtagataaaagctgggtatctcgcgtggcggaagtgatcgacattccgttttgtgtggcgggtgggattaagtctctggaagatgccgcgaaaattctttcctttggcgcggataaaatttccatcaactctcctgcgctggcagacccaacattaattactcgcctggccgatcgctttggcgtgcagtgtattgtggtcggtattgatacctggtacgacgccgaaaccggtaaatatcatgtgaatcaatataccggcgatgaaagccgcacccgcgtcactcaatgggaaacgctcgactgggtacaggaagtgcaaaaacgcggtgccggagaaatcgtcctcaatatgatgaatcaggacggcgtgcgtaacggttacgacctcgaacaactgaaaaaagtgcgtgaagtttgccacgtcccgctgattgcctccggtggcgcgggcaccatggaacacttcctcgaagccttccgcgatgccgacgttgacggcgcgctggcagcttccgtattccacaaacaaataatcaatattggtgaattaaaagcgtacctggcaacacagggcgtggagatcaggatatgttaacagaacaacaacgtcgcgaactggactgggaaaaaaccgacggacttatgccggtgattgtgcaacacgcggtatccggcgaagtgctaatgctgggctatatgaacccggaagccttagacaaaaccctcgaaagcggcaaagtcaccttcttctcgcgcactaaacagcgactgtggaccaaaggcgaaacgtcgggcaatttcctcaacgtagtgagtattgccccggactgcgacaacgacacgttactggtgctggcgaatcccatcggcccgacctgccacaaaggcaccagcagttgcttcggcgacaccgctcaccagtggctgttcctgtatcaactggaacaactgctcgccgagcgcaaatctgccgatccggaaacctcctacaccgccaaactgtatgccagcggcaccaaacgcattgcgcagaaagtgggtgaagaaggcgtggaaaccgcgctggcagcaacggtacatgaccgctttgagctgaccaacgaggcgtctgatttgatgtatcacctgctggtgttgttgcaggatcaggggctggatttaacgacggtaattgagaacctgcgtaaacggcatcagtgagttgcggggtaagcggatgcgatattgttgccgcatccggcaaaaaaacgggcaaggtgtcaccaccctgccctttttctttaaaaccgaaaagattacttcgcgttgtaattgcgtagagcattacgccccagcacaatccccgcgccaaccatgccacccagcagcaccgccagaatcaaggtaattgcctttttcgggctatcacgacgaataggtaacatcggtttcatcacataacggtaagcatgaatatcaagatcatcaacttttaagctttcgatatccagcaggttttgacgagtctgatagtagtttggcgagaacaccaacggacgggtcgcctcatgcttaatcatcgactccagcgcttcgctccccaaaaggaacaacgtatcttgtgtgatatcttcgccagtctgttgaatctgcggttttgtcacctgcgcctgattcgcatactgcaacgcttcctgaatctgacggatacgcagatctttctgctcctgcgcgactacttcctgcgttcttaaagagtcctgcaagtttttccgtcccagagcaatgttgtctttgagatccttttctagctcttgattcactttatcgtcaacttgctgaatgtattgggccaacttcatttgtgcgccctctgcagtttgcccaacataagaaacagtcaatggtaattgctggttcttaacagaaggttcgatggtaagtttttctcgttcttcctgattatccagcgtttctgctaatgcagagaaggcagaactgaagcgaccaattaacgtctcctgcaaatccgatactttcggtgcagcctgaccatagataacattcatggcattgttatagccagcaatttgccccacgtcgggctgagtgataattgctgttgacgtccatttctccttcgctactgccaaatatccaatagccagggcaatagccacaatgacggaaatgatgattgtcatcttgccacgccacaactgcactagtaaatcaatcaaatcaatctgttccgggtcatggttttgcccagaaacattattattttctactctcatcattaccctaactgacggaaatttccaagtccgcatagtttagcgataatcctcgtgaatgctataggataagtgataaaaataatgaattgttgtgtaagtaacaaaagacaatcagggcgtaaatagccctgataacaagatgttagtcgctgccaaagagatcgcgggtgtataccttatctgccacatccttaagctcttctgccattcggttagagataatgacgtcggcttgttgtttgaaggtggcgagatcacgttccaggcgagagttgaagaatgagtcttctttcatcactggctcgtagatgatcacttcaacacctttcgccttgatacgtttcataatcccctgaatagaagacgcacggaagttatctgaaccgctcttcataatcagacgataaatacccaccacttgcggcttgcgtgacaaaatggcatcggcaataaaatctttacgcgtgcggttagcatcgacaattgccgagatcaggttattcggcacagactggtagttcgccagtaactgcttggtatctttcggcagacaataaccaccataaccaaacgacggattgttgtaatggttgccaatacgtgggtcgagacaaacgccttcgattatttgacgggaattcagacctaaactttctgcatagctatccagttcgttaaagtacgccacgcgcatcgccaggtaggtgtttgcaaaaagtttaatcgcttctgcttcagtggagtcggtaaacagcatcgggatattttgcttaatcgcgccttcctgtaacagagcagcgaaacgttctgcgcgttctgaacgctcaccgatgacaatacgtgaaggatggagattatcgtaaagggctttaccctcacggagaaattccggggagaatataatattttcagtgcgatatttcttatgcatcgctgcggtaaaaccaacgggaaccgttgatttgatgaccataaccgcataaggatttatctcaactacgtctttaattactgattctacactggatgtattgaaataattagttttaggatcatagtcggttggagtggcgatgatgacataatcagcatcccggtaggcttcatttttatctaatgtggcattaaagtgtattttatctgattgcaaaaactgctgaatttccttatcaacaataggagatatccgatcattcagcatagcaacgcgtgacggtaaaatatctaatgccacaacctcatgattttgtgcgattagaagcccgtttgacaagcctacatagccagtaccggaaatggtgattttcatttcatgctctcagaattaacttaactgtgaatcatgatgtttttagcatcctgataagagctaaaagttttaacgctacgttgttcgatggtcaacgcaacgaaaaacaattcagattttctttataagaatagctgatatttattaagttaatattaagcagtgaaatttagtctataagatatttggcaaaaaaaagcccggtgcaatatacgccgggcctcaattttattgttggttaaatcagattaatccagccattcggtatggaacacaccttctttatcaatacgcttataagtatgcgcaccaaaatagtcacgctgtgcctggatcaggttcgcaggcagaacagcagcacggtagctgtcgtaataggcaaccgctgcggagaaggtcggaaccggaataccgttctgtactgcataagcaacgacatcacgcagcgcctgctggtagtcatcggcaatttgcttgaagtacggagccagcaacaggttagcgatctgtggattttcggcataagcatcggtgattttctgcaggaactgcgcacggatgatgcagccagcacggaaaatcttcgcgatttcgccgtagttcagatcccagttgtactcttcagacgcagcacgcagctgagagaagccctgggcgtaagaaacgattttgcccagatacagcgcacgacgaactttttcgatgaactcagccttgtcgcctgctggctgtgcttgcggaccagagagaactttagatgcggcaacacgctgatctttcagagaagagatataacgtgcaaacacagactcggtaatcagcgacagcggttcgccgagatccagcgcgctctggctggtccatttaccggtacctttgttagccgcttcatccaggatcacatcaaccaggtagttaccgtcttcatcttttttggtgaagatatctttggtgatgtcgatcaggtaactgctcagttcaccgttattccactcggtaaaggtctgcgccagttcttcgttggtgaggttcaggccacctttaagcagagaataggcttcagcaatcagctgcatatcgccgtattcaataccgttgtgaaccatcttcacatagtgacctgcgccatcggcaccaatataggtaacgcatggttcaccgtcttcagctacggcggcgattttggtcaggatcggtgctaccaattcataggcttctttctggccaccaggcataatagaaggacctttcagcgccccctcttcaccgccagaaacaccggtaccgatgaagttaaagccctctgctgaaagctcacgattacgacgaatagtgtcctggaagaaggtgttaccaccatcaatgatgatgtctcctttatcgagatatggtttgagggaatcaatagcagcatccgtgcctgcacctgctttcaccattaacaggatgcgacgaggcgtttccagagattcgacaaactctttcaccgtatagtaaggaaccagtttcttgcctggattttcggcaatcacttcttccgtcttctcacgggaacggttgaaaatagagacggtataaccacggctttcgatgttgagcgcaaggttgcgtcccatcactgccataccgactacgccgatctgttgcttggacattacatactcctgtcaggtgtgatcaccgcgctgaatgctcgcggcctggaatgttcgcaaataagtatacaaagtacttattaaagtataaatagcttatccatgcttatatgcttacggctttatattacgggtgaaaaactgatgaaattcgatcaaagttgcgatttgataaaatacgttttctggctaaatatctaaaagtactttttaagtgccatctgaaggcttttgaaaaaaaacttcgattgtcatgatgagcataatgtatcgcatgaaaagcgggaacataatgaagtctgacaccagccaggctaagcctcaagcacaggtcaatatcttcacagtacataaagtaaccttgatcgaagccatttacacgcacaaaatctgaaaaacgtaccagcataaatgatcctgcgcaccaatcaacaaccgtatcagaatagatactttctttaggaatttttgttttattaaggaaggtgcgaataagcggggaaattcttctcggctgactcagtcatttcatttcttcatgtttgagccgattttttctcccgtaaatgccttgaatcagcctatttagaccgtttcttcgccatttaaggcgttatccccagtttttagtgagatctctcccactgacgtatcatttggtccgcccgaaacaggttggccagcgtgaataacatcgccagttggttatcgtttttcagcaaccccttgtatctggctttcacgaagccgaactgtcgcttgatgatgcgaaatgggtgctccaccctggcccggatgctggctttcatgtattcgatgttgatggccgttttgttcttgcgtggatgctgtttcaaggttcttaccttgccggggcgctcggcgatcagccagtccacatccacctcggccagctcctcgcgctgtggcgccccttggtagccggcatcggctgagacaaattgctcctctccatgcagcagattacccagctgattgaggtcatgctcgttggccgcggtggtgaccaggctgtgggtcaggccactcttggcatcgacaccaatgtgggccttcatgccaaagtgccactgattgcctttcttggtctgatgcatctccggatcgcgttgctgctctttgttcttggtcgagctgggtgcctcaatgatggtggcatcgaccaaggtgccttgagtcatcatgacgcctgcttcggccagccagcgattgatggtcttgaacaattggcgggccagttgatgctgctccagcaggtggcggaaattcatgatggtggtgcggtccggcaaggcgctatccagggataaccgggcaaacagacgcatggaggcgatttcgtacagagcatcttccatcgcgccatcgctcaggttgtaccaatgctgcatgcagtgaatgcgtagcatggtttccagcggataaggtcgccggccattaccagccttggggtaaaacggctcgatgacttccaccatgttttgccatggcagaatctgctccatgcgggacaagaaaatctcttttctggtctgacggcgcttactgctgaattcactgtcggcgaaggtaagttgatgactcatgatgaaccctgttctatggctccagatgacaaacatgatctcatatcagggacttgttcgcaccttccttaatccctaacataaatgacacaataaaatcagaaagcacaggaaattttcttacggaataatcatgtaaagatttcgcttcatctcggaacaggcataatgtactaaaagcataacgcttactttcgacatatttaatatatgtcagcaaatcatcatgcttcatgatgatatcgggattcaaaaacaaaatgtaatcatcatctgcgggtctatatttttcctttacatacgccaccgcaatattattattatgaccaaagccgtatacacctccactaatatagtccaggcctgcataatgctggcatatttgtttcaataatagagagtctttgttgtcgcgtacgataatcttgtagtgctcatcgtcagcattaagattttcgagtaattttttgatgtagtcttcatgtccgtgggaaacgattattatatataccatttcaatgttcttcagtaataaaattaactagttcatcaaacccaactaatacattttcattacgataaatgaaatttgcatcagagatatcttttttgaggttaccttttttgaagtcaataataagtttaactaacatgtcatcgttattagaatcaaaaaaagctttcttttcataactaccaagagtttctctagtaaatgggaaatctgatgctaatacccacttacctcgctctttagcttcagacaacggcaatccccatgtttctaacctagagggaaaacaaactatatctgaaatattataacaatgatcgattttttctttatccaagtacccgaggaaatgaacattatccagtccttctgcaagactgataatatattttgcatacgcattttctgtaccactgatagtaagcagaaatttaatattggattgttctttcaatttccttgctgcactaataataagctcgtaatttttaaatactcgtggaacagcagggtaaaatattgtcaactcagaagggttattcttaaattgagaatcatcatcagtaagttggcttttatcagataatttaatttctggccgactgacaatgatgttatttatagaatatttcttgataaatttttctttcatccagaattgttgaacaaacactgcagtattttttttaatgtttattttatatatcagcccgtatagcattttaaataagaaaaagctaggctccataagaatttcacggaataaaattcctttataaaaaggtgcagggttatgacaatacacatatctttttttagtgacgacattggccgtaatatcatgcagacaaatccaatgcgtagcattcagctcttttgaaagttttttacaaactacatattcaaagtgcaaacgttttagccacgaccctttaacctcaggaaactcaatgaatttaacccatggataactttcttttaactctttagcagaatggactaatgcgataaaactgacattttctttattattagttgctgccaaaaattttttcaaaatggtaaatggaccgccagtggtaaaattgaccgcagaaacaacgactatgctttttcccataatttggtctcatgattgtatttctttatgatttttgctggtactcccgcaatgacagtattttcgggaatagaacctctaacaacagaattggcgccgactacgactccattaccaataattgttccaggcaaaaccgtcacattctcacccaaccaaaccctctggccaattacaacagctgaagattccaacgtgcgcatgtctggaggtatatttggcgaactcattggatcagagtgcttaaaggaaccgtgattatgatcggtaataaatactttacttgcaataagcgtatcccgacctatcgtaacgctctcaattgaggcgatatgaacatagtcgttaacttgcacattatcggaaaaaaaaatcacgccacgtccaaatgcatccagcctgagaccgactccacttgtgaaattttcaccaaaattaatgctaccatcattgcgaatatagcagggaaatcgaataattctacagttccggtaaaatacacgagtcaataagacatctctaacaagccgaataaaaccacagagaccatatcgtttagcgagttttaagatcatcgatcacctcttcaagaacatccctgaagtaacttcctgttcgaattttctgagaaataatttttgtattctcactaatttgcttataagtttctattgtcatggagtcaacaatctcttgcatttctttgattgatcccactgcatatcctattctattatctacaatgaaatccgcaagggcggctttatcccatataaatactggaagttccattgaaagataaagagatgtcttatgagggttattaaactttaaatagtcgccaaaggcaccactacaggtttcgacagaatctccatcccaaatgagtccaaattgcatgcctgggaggttaatcttttccggagattgagcatcaaaacttccaagatatttaggattatctttattttcatagttgacaccaaagagagtaaaatcgcatccttcagtatatatgaaagaacatttatgcctagaaaggttgccagcatatatgacccctcgttgcttatccgtaacatctcgatgctccacatcagatgagacgaggtaatcaaatatttttatgtctttgattttatcctgagacatatatttactaaggtactttgtcatttgtggattgtgacttatgaccatatcacaggtagcaagccgcacagaatcactaccccctcctcctcttaattcatcaatatcatgaatcagaggtactattctaaattttagaaggcggtgaaagaatgacaatatatgccaaaatggtttggccatcgggaaattgaaaattaaaacatctttattttcaagaccgcagagaaatgtactaagcttaacagaactaataattctctggactactccaccccatagaggaatgttaacaacagaaatgttttcataatctgaagcaatgtccagtgcatcttttcttgctttaaatccagcatcgcgtctagagaaatttaaatcattcaaaaaatacattttcactttattttctgggccttaagaaattgagagaatactatgatacaaagagttatttgtatccaactgctaatattagtcatgaagctttcatgataaaaaatgaaagaaaaggtataaataaaatatgaataaaatattttcacagatatgtaatttcgagacaatctccataaaacacctgaaatacagccatgaataaccatcatcaaatagcttagctccgcggaaatataaacataatccgaaaaagcagtataaacatttgttggcaaacccacccacacaaattctttatgcaacgacatagagactccacctgttaatagccccatcagcctttcaaaaaaccaaaagacatgagaactggcagagttagatacttgctgaaaataaaactcctgaaacgcgattatagggctgaccaaatacatggatagataatatgccatccccccaggcagtccacgtaaaaagagcatatacaaggagaatagaacacctacagctgtaataagataaacataatgttttactctattaacacctacgatgaatgcataagagatgataaccataaagacaatttgcttaccagtattcagtataattgcaaagatgaatacaataaaaacaagtaaagtaaatgttttacttacctttgtattagtaaattttttagaccaaataaataaagcaaaagtagttagaatgattggctgcatgtatgctgagaaatttcttgatgtgtcttcaacatcagcatctcttatcaaattcatatagctaagtaagctagtcccgaactggtagttacttaacctcatgcatatatatatcatcgaaaaagaaataactaacaagcctacattatgcactttcttcgatggtatgctataaatagcattattgacttttctgatatttagatctaatacactttccgtcaataaacatgacagggtaaatgtcaaaacattgcaaagtagaaaaatcaacgtagcgtcatttaactgaaaagcatatatatctgacgttatttcatatcccaataagaccagtgcgaagatgatattaacgcatacggctggataaaatatatccttcttaagatataaacagataaatgctgtaatgagaaagacactaattacaagatagatcattaatccgtactcattatatttttcacttgataaagagcggcagatatcacttgatgcatatcataatatttatactcggccaaacgcccgccaaatataaccttgtcttctctgctagctaactctctatatttcttaaaaagctccatgtttttattatcattaactggatagtagggttcgtcgccaactttccactctaatggatattcttttgtaacaaccgtatgctttgtctcaacatagtcaaaatgtttatgctcaattattctggtatatggtacattagcatcagtgaaatttattactgcattcccttggaagtttggaaattcatggcgttccgtctcaaattttaaagagcgatattctaacgctccaaacctatagtcgaagtactgatcaatgggtccagtgtagatgattctatgggctttactcgctagagaatctttgtctttcaaaaaatcaatgcctaattttacgtccacaccttcaagcattttttcaataagcttagtgtagcctcccaccggaataccttgatagcgatcggaaaaataattgttatcaaacgtaaatctcactgggattcgcttaataataaatgcaggcaattcttttgcacttcttccccactgcttctccgtataaccctttatcaatgcttggtataagtcctccccaactaatgaaatcgcctgctcctccaaattttcaggtaccttgtcaccatacttttttttctgagcattaatgatattttgagcttcttgaggatctttaactccccacatttggtggaaagtattcatattaaaaggaaggttgaataatttgtctttataaatcgccagtggagaattagtaaaacgattaaattctactaaatcattaacgtaatcccatatatatttatcattggtatgaaaaatatgtgcaccatatttatgaatctggataccctcacagtcctctgtgtacgcatttccaccgatatgatttcttttctcaatcactaaaacttttttgtttagcttttttaactcattcgcacaaacggcaccaaacaaaccagaaccaacaatgatataatcgtacataaaatcctcagcaaaccagtaatttattatttcttacgaacatcagcatgagtgacgtaactaagcactctgttgcaagcaatgttattgctgcaccaatctctttaaaaagagttgttagcggaaaaatcaacaacaaactcaacaaacccgcagcgattaaaatcttactgaattctttcttataattatgggtcagcataacttgaatgccatagacattacttaatgaaataagaaaaggcagaggcgatataatcattagcacaatcactgcattatcatatcccggccctatacttatttttactagtatagatgcacccaagagcagaattaatgaaaaagcaccaccaatcaaactcaagcaggtcaatgattttttaattaaaatcacacccttcacacgattaagaacaagcgtacttgatattcttgggtatattgcttgggtgataggatttaatagcccttgaagcgcgtttcttatagtattggccgcattaaaattccctacggacgttggtccagatataaatcccaggataataactattcccgtagaatataaactaatagcagatgtggaaataaaaacatgaaaaccgtctgctaaagatcgacgcacattatgtaatgatagcgtaactttaccaatccaaccttcatgaacaacgatagctagtgcaataattccagcaaccagatttgcacttgactgaataaaaccggcaattgctatatctgactttgtgttcacaaaaataaatgttagagggataatagccaagcgggataaaatactacttaaagtcagccatttcattttttcttttccctgaaacagccagatagggtagattaaattcccgactaatgcaggaacaaacgaccatataattacggcatgcttgttatattcaggaacaagcaaggtcatcgacgttaagaaaatcaatgtaatgacgataagaactatttttgaaaatatcaccgcccaaaaaatagacgttactttatctttactatctgctgctttggcaatactctgagttgctgtgagattgaaaccatattcaacaaacattatcatatatagcatagtcgcttggcaaaaaccgaatataccgaaattttcaggaccaagtgttcttacaagatatggaaatgtaagcaatggtaaaagataattgctaccttgaacgacagccagatatataacgtttcttcttaaagataatttattcgtattcatgcaattaattttaatctgataagctcatctaacgtaaagagcctttcatcttttggcgaaaggattaaccctgatgtttggggccaatcaattgcaatgcgttcatcattccaacatattccacaatcgctttcaggatgataatagtttgtagttttatattgaaattcagcgatatcagacagaaccaaaaagccatgagcaaacccttttggtatccacaactgctgcttattatcagctgaaagcagaacaccaacccatttaccaaaggataccgaattgggtcgaatatcaacagcaacatcaaaaactgctccatgagtgcagcgtacaagtttatcttgtgcgtactcgccgcgttgaaagtgaaggcctctgagtacattttttgatgaacgtgagtgattgtcttgaacaaagctgaccggatagcctagaatatgttcaaatgctgattgattaaagctctcataaaagaaacctctatcatcaccaaatactcttggctccagaattagcacatcttcaatttcagttctaatcacattcattaatttgaatccttcgtcattttataaagatactgcccataattattctttattagtggtacagctaattttcttacttgctcaacatcaataaaacctttacgaaatgcaatctcttcaggacaggaaaccttcaatccctggcgctcttcaattgtcgcaataaaattacttgcttctatcagactctgatgagtccccgtgtccagccacgcgtagccacgccccatcatcgcgacagacagacgtccctgctcaagataaatacggttaatatctgtaatttctaactcaccacgtgcagacggcttcaagtttttcgccatctgaaccacgtcgttatcataaaagtacagacctgtaacggcgtaattactctttggttctaacggtttttcttccagactgattgccgtaccgtttttatcaaactcaacgacaccatagcgttctggatcattaacgtgataggcaaataccgttgcaccactttctttgttaacagcggcctccattagcttcggcagatcgtgaccgtaaaagatattatcaccaagaaccaaagcacaatcatcaccaccaataaactcttcaccgatgataaatgcctgcgcgaggccatctgggctaggttgcactttgtactgaagattcaggccccactggctaccgtcacccagcaattgttgaaaacgaggagtatcctgaggtgtactgataatcaaaatatcgcgaatacccgccaacatcagtgtagagagcgggtaatagatcatcggtttatcataaataggtaatagctgtttactgacagccatagtcacaggataaagacgtgtaccagaaccacccgctaaaataatacctttacgcattttcatttcatcattccttttaattcatcttgctccaccatcacgaacaagatgcaaaaactattaaattgctgtagtcgtaaataattcattgagcattcgtttcacgccaacctgccagtcaggcaagacaagcgcaaagttctgctgaaatttttctgtattaaggcgagagttatgtggacgacgagctggtgtaggataggctgttgttggtactgcgttgagcttgttgagtgcaaggggaatgcctgctttgcgcgcctcttcaaaaaccagcgcagcataatcgtaccaggttgtggtaccactggctaccaaatggtacaagcctgcgacatccggtttattcagtgcgacacgaatggcatgtgctgtacaatcagccagcagttcagcacctgttggcgcaccaaactgatcgttaataaccgctaattcttcacgctcttttgccagacgtaacatcgttttggcgaagttatttccttttcctgcatagacccagctggtccggaaaataagatgcttcgcgcaatattcctgtaacgctttttctccggctaacttggtttcaccgtaaacatttagtggtgcggttgcatccgtctccagccatggcatatcgccatttccagggaagacgtaatcagtcgagtaatggataacccaggctccaacttcatttgctgctttcgcaatcgcttcgacacttgttgcgttaattaattgtgcaaactccggttctgattctgctttgtctactgcggtgtgagcggctgcattgacaataatatccggccgaatgcttcttacggtttcagctacaccttcaggattactaaaatcaccgcaataatcagtagagtgaacatcaaaagcaatcaaattacccaaaggtgccagagcacgctgtagttcccaacctacctgccctgttttgccaaaaaggaggatattcattactggcggccctcatagttctgttcaatccacgattgataggcaccacttttcacattatcaacccattttgtattggacaggtaccattccaccgttttacgaatcccgctctcaaacgtttcctgtggtttccatcccaatgcgcgaccaatcttctcagcatcaatagcatagcggcgatcgtgtcccggacgatcagcaacataagtgatttgctcacgataagatttctctttcggtacaatctcatccagcaaatcacaaatagtgagcactacatcgatgtttttcttttcgttgtgcccaccaatgttataagtttcacccgctttaccttcggttacgacggtatataacgcacgcgcatgatcttcaacatacaaccagtcgcggatctgatctcctttgccataaataggtaatgccttaccttccagtgcattaagaataaccagtggaataagcttttccgggaaatgataaggaccatagttgttcgagcaattagtcacaattgtcggtaaaccatatgtacgtttccacgcgcggactaaatgatcgctggatgctttggatgcggaataagggctgcttggcgcgtaagctgtcgtctcagtaaataagggtaattcttctgtattatttacttcatctggatgaggcaaatcaccatagacttcgtcagtagaaatatgatgaaaacggaagctatttttcttgtcgctatcaagagcagaccagtaattgcgagcggcttccaaaaggacataagtaccaacaatattggtttcaataaatgccgcagggcctgtaattgaacggtcaacatggctttcagcagccaggtgcatcactgcatccggctgatgctgagcaaaaatccgtgccattgcaggtgcatcgcaaatatccgcatgttcaaaaacatagcgttcagaatcagaaacatcagcaagtgattcccggtttccggcgtacgttaatttatcgacattaacaacactatcctgcgtattatttataatgtgacgaactacagctgaaccaataaatcctgcgccaccagtaacaagtattttcacttaatttattccatattacttcagagcatgctgtgaaataagcggctctcagtttgattaatagaggtattaatgcacgctaccgcccctggctttacagctaccagagcactgcatgcatgcctatgatgtgacgagcgttacccactcgcgctaaacccgaaaaattcaaacgctaattgtcttaccaatccgctctggaaacaaggaaaatcctggaaaactttgaataaaaccctactgctaactcgttgttattctgatggtttatataaaacaacggcaggaagattcgcaacaaattacttttgctgcgaattttcactgccgttataattttcttatcaaccgttacatccggtcagattttcattattcgcttaacagcttctcaatacctttacggaacttcgccccttctttcaggttgcgtaggccatacttcacaaacgcctgcatatagcccatttttttgccgcagtcgtaactgtcgccggtcatcagcattgcatcaacggattgttttttcgccagctcggcaatagcatcagtcagctgaatacgtccccatgcaccaggctgagtacgttccagttccggccaaatatcggcagaaagcacatagcgacctacggccatgatgtctgagtccagcgtctgcggctgatccggtttttcgataaattcaacaatgcggctgactttaccctcacggtccagcggctctttagtctggatgacggagtattcagagaggtcacccggcatacgttttgccagcacctggctgcggcccgtttcgttgaaacgtgcaatcatggcagcaaggttgtaacgtagcgggtcggcgctggcatcgtcgatcacaacgtctggcagtaccacgacaaatgggttgtcaccaatggcaggtcgcgcacacaaaatggagtggcctaaacctaaaggttcgccctgacgcacgttcataatggtcacgcccggcggacagatggactgtacttccgccagcagttgacgcttcacgcgctgctcaaggagtgattctaactcataagaggtgtcgaagtggttttcgaccgcgttcttggacgcgtgagttaccaggaggatttctttgatccctgcagccacaatctcgtcaacaatgtactgaatcattggcttgtcgacgattggtagcatctctttgggtatcgccttagtggcaggcaacatatgcatcccgagacccgctacaggaataactgcttttaaattcgtcattatttcatccacctgtaaaatggttgctgaattatagcttgttcgatttttttcgccagcatcaattaccctgaattgattactgaattacttgtgatgttacgccgcttcgttgtggattgcagtagcattgttcctaagtatgactccatttttccaggaatggtcgcaaatctactccctcagttccggcaatctaaagttaatcttctccacattaacaatatggtgattaatcctgtcgatatcgacggagctttgtcctttttcattcaccgcatgaacatttgcaagagacagcagtgtttcttttttcgccataaaaacaccacgaacgtctttgcgcatgtcaaagttcatgctcaatgcgggtccaactgaggattcctgcatcacattgatatttcgcataaaaaaatgttgcggtttgttgtgtaactccagcgacgcacgcttcatctcaatgttagttagcgccacaaaggaaacagcattcccggcggagatttgaatgccgcgcaatttataagcaagatgagtattatccagttgaatatcattcacccggaaattttgcggtatcgagagatatttgcctttaattaccccatagccgattaacatcccggcgctattaatcatttcaatattatcaatcacgaaattgtcacaaccgtaaatagcgactgtcgcgttatcaatgcccgctttcttactgaaatccggcgtgatattgcgggctttgatattacgaataacaaaatgtttaccattttcaacatgtatcaactgccgacaatccgatcccgtgatattcgccacgacaaagtttttcactgcctggtcttccgggtagttgttatcataagtgcttcccgcaaggcctatgccgatgccccagttgattttgccgttggtacagttgatgcgctcgatgacatggtcagatatcaaaatatcacggtcgttaattgccacgttccattcaatggcgtcgccttgtaagtcgctgaacttacaattggtgatgttggcaccgataatctggttatgaaatccctggcgtaagatggcgtaattagcgtggctaacggtcaggttatcgatgatcaggttgcgcatgacccgtttgtttttgccgccgatataaatctgcgtcaccgggccaaagccgctcatagtcagccctttgatggtgcagtcagaaccacgcacatccagggtgatgttatgcatactgccgccatcctcccctgtcacctggctgccgtcctgtaagacaaatcgccctctgccgttgccgcgcaagcttccaagaatgtgtaacgttttaccgggagggataaagatgccggtgttgatattgtcacaaaccaatccggcaggcacgacgactgtttgcccttcgctgaaggcttgtttaaatgaggcgatccagtcgtgtgggttgtagtcgttaatgttaacgctttgtcgggcgggaagcgcgcgggcgaaaggggtatggaggaaggcaagcgccgagcttgccgtcaggaacgtgcgtcgggagagttttttaaatggcatgcgttctcctctataaagcctgcagcaagctggcgagttctcgattgatcacctgctggttaaaatcgtgttcaactttttcgcgcgcgcgtttgacgaccggagccaattcgtcggtgtccagttggctaaacgccgccagtcgttgcgccagtgcgcgagcatcgttctcaggcaccagccagccggatttgtcagcctccaccagttccggtattccactatgcagagtagaaaccaccggaataccgaccgccatcgcttccattagcgccaccggaataccttccatatcaccatccgcacctgtaaccgatggcaacaggaagacatccgcgtcgtcgagcatcgctttcacttcatggctcggtttaaagcccggcatctccaccacatcttccagttgatattgttcgatgagggtgcgcaggcgtctttcccacgggccaatgccgaggatgcgatagcgaaatgccacgccctgctctttcaactgacggcaggcttcgatcgccacatgcaggccttttttctcggttaagcgtgcgacggaaataatctccagcggcgttgcgggcgctttcacgggacgcgggctaaagcgcgtcatatctacgcccatgcgcgatacggcgattttttccctcgggcagcccattttttgcagccttccggcccacagatcgcttatcggtaacatcaggtcgccacggcgaaacagttgctgatattcgggagtgtagtggttgagcacttcccgactggagatatcaataccgtggaagatagtggcaattttgccgcgaatgacacccagttcgcggagttttgctgcggttacccccgcgggaccaaaatgagcgatgaacacatcggcgcgaaacggtgttgcgacctggccgcaaatggcagacaaaatcaggttccgcgactcggcaccatagcgtttgaggttgagcgcctgccaggtatttttacgatgaatgccgcgcaaggtctggctggctcggtggcgcagtttcgccactttgcccgtaggttcgtcctgtaaccagcgggttctggcagcaaggttgtatttcgtccatgccgcgtgggtgttttgtgtgtcgcctttttgcagcgcgagaatctctacctcaaatcccatatcaataaacgcggtaatttggttaaggacgaaggtttctgacgacagcgggaatttcagtaaaaagaagccgaccttcatttcacctccccgatgcgctcaagcacagactgcaccatctgcattcctgtctgacgctcacgactgacggcttcactaagtcgcgcattcagcgccggaagctggcctaaggtatccgcaaccatcgcttgcaggctgccgtctaataaatgacggatatcaattgccatctccggtagtcccagctgctgcataatcccggcggatttatgttcgtagttgatggcaattgccggagtggcaaaattcatcgagataatggcagagtgcaggcgcgtaccgacggtgagttcacaggcccccagaattttgcccatttccagatcgttgagttcatccatcactacgtggtaacgggcaggatcgctgatgtgctggcgcaggttgagcgccaccatgcggtcgtctttgttatagctgtcaatgcccgtacaggtggagagcgcaatcacctgatacccttcatcgagaatgcgattgaccaccccggcaaaggctttttcatacgcttgttgagtggtgccgagacgtttgtcaaacggtgccagttcgcgcagggtaatggccaccgttttctgttgtgcggcaacgtccagccagtgttgaacggcatagctggcggtgaagtcttctgtgtggtgatcgaccagccacgcggtatcgacgccatgttccacttttgcggtggtgatattgctgcgtttcatcagatcaaagctgaccgattcgcgcaggatcagcgcgtcgcagtgaccaaaaacgtagttcgccagttggttaaattgctcatcctggaacgggccaacactgtgaccaatcataaacagcggctttttcgccataaacgtgcaaagtgcatgttcaaactgcggcacgccatagagatcgacaaaaaacgatccgccgacctggataatggcgtcgtaacctgacagcaggcgcacgaagtcggtgaatccctgggcgatggcgatattgcgcagcttgccagtgtcggtgacgcgtgagagcaatacctgatgctggtagcggcgacggaggacttttttaacgcgcccgacaacgcccgccgcgctgttgtgttgtttcatttgcaggaacagcggatcgcccattaccgggcggttgagcagccaggaagaactgaccggatagcggctcatcacatccacttcggcgtgtggattgagaatgttgatggcatcaagtaagccgcgcaggatggcgctgtcgccacgattgccgcaagtgtggttgcccagaataagtaatttcattttttcctcataaatttgatgccaggtgaggctgcgtttgttttgttcgttgccgctttttgcctgatgcgacgctgacgcgtcttatcaggcctacaagacccgagcacagaaccgtaggacggataaggcgttcacgccgcatccggcattcagtgcctgatgcgacgctgacgcgtcttatcaggcctacaggtcccgagcacagaaccgtaggacggataaggcgttttacgccgcatccggcaaccgttgtcggaaccgaaaacagcaactcaccccgcccgtaaaagcattttcattttttcgctgcgacaaaactgacgcttcacttccaccaccagcggatggcgcgacagcacaatcatcaccacaaacgccagcacccccgtggctatttgcaccgccagcagcatccccagcgccagttgccctttcagcacaatgcccagcgcataactgaccaccagcgtcggcagcgagagataaaacggcagccataaactcaggatgtactggcgataactggaaccaagaaccggtttaatcatcacgaagtaactcagaatggtgttgataatttgcaccagcaggaagccaagcgtgacgccgatcgcgcccgccatctgcccacctataacaatcgccggaataaacagaaatgttttgaatacgttgaatttaaagctgatatcgacccgcgctttcgccatcagcagcgaaccaatcgggttacctacggagcgcagcagacccaccacacacagcaattgcagcaccggaataatgctgttccacttctcaccaaagaccagcggtacaaagttattcgacaccaccattagcccgagcagcgccggaaagttgataatccccactaccgacagcagcttgtagaagttaacacgcagcttttcggtatcgtcctgaattttggcgaatgccggaaacaacacgcgggtgatgattgggttcagcttcatcggtggcacaacggccacgttgtacgccaggttgtatccccctgccacgcccgcgccgagaatacgcgccagcacgagcgttgaaaggttggtattgagatagttgatgatgctgtccgccgtcagccaggcaccaaagcgtaagttcggtgccaccgacgccagcgagaaatgcagaccggggcgataaattttgcggccaaagtagccaaacagcagcgttctcaccgcactattgaccagataaccgaggatcgcggtcatcgccagcggccagaaatgggcgctaaccaccgtacaagtgaagcccgccagcaccgcgctggtttcgatcatgccgattttgttgaactccagctctttttgcatcaacgcgcggaactgttgcccgtgggggattaccacaaacgccagcgataatgttttaatcaacggtgccaggtccgggttattcagcacgtcgccgatgagatcactcaacaaaaacaccgccacgcacaccacgatccccagcccgacgttcagccagtacaacgtggtgagttcaaggtgactgatttcttttcgctgaataatcgagttagcgataccgaagtcagaaagcgtatctgccagcgcgataatcaccagcgacacggtaagcaggccgaactggtggttgtcgataatccgcgccagcacggtcatctgcaccagcccgaggccgatgatgatcaccgtggcaatcgccgaccacttcgcgccgctgatggttttttcacgtaagctcatatcaatatgccgctttgttaacgaaacctttgaacaccgtcaggaaaacgattttgatatcgaaccagacgctccattcgcggatgtactcaaggtcgaactcgacgcgtttttccattttctccagcgtgtcggtttcgccgcgccagccgttaatctgcgcccagccggtaatgcccggtttcaccttatggcgcagcatgtagccttcaatgagctgtcgatactgttcgttatgcgctactgcgtgcggacgtggaccgacaatcgacatccccccggtcagcacattgataaactgcggcaattcatccagcgaggtacggcgcagaaagttccccactttggtgacgcgcggatcgttctgcgtcgcctgggtcaccactttgtcgttctccatcactttcatggaacggaacttccacactttgatcggcttgccatccatgccgtagcgagtctggcggaaaataaccggccctggtgaactgagtttcaccgccagcgcaatacagcacagcaccggggagatcagcagcagaataagcgtcgccagcacaatgtcttccgcacgtttgagcaggcggttaaccccggaaagcggcgtgtcgtaaagcggcaccaccggtacgccgttcatctcttcgaggcgtgaatggagaatgttgaaggtaaagacgtcggggatcagcagcaccgaacaggtggtgtccgccagttgatggaccagttttttcactcgcgcgccgtcgcacatttgcatcgcgatatagacgttatgaatcttgcccgctttcgcgtcctcgaccagctgttgcaggttacccgcccagtcgttagaaacgccgcccggtttcgggtcgtggtaaacgcccaccacttcaaaccctaaccacggctggttacggaagctctccatcagcatttgcccggcggctaaatcccccgccaccgcgaccatgcgcttgttatagccatgattacgcagccagcccgccccaatgcgaatacacgaacggcaaaccaccagtccgatgctggtcagcgcataccacgccagccagattttcagttgcgtgtcgaaatcattgttgaacgccaccagtccggcgctgaaaatcacgcttaaggtccagttttgtagcaacagggcaaattctgtcgctgcccgaacaccgcgccatgagcgataaaaatcggtgatgccgcccagcatctggaacaccaccagcgtaatcagcgccaccaacaggtgcatgtagaggaatgacagtccgctgacttcgcaaaccagccatagtccggcaaacatgatggtgatatctgaaaagcgttgcaccatagagattaacgatgcattggttttcgctcgctcgcgcttttttagatttgtcatcgttgttcctgttattagccccttacccgcagtggggtaagggaagatccgacattactcgttcagcaacgtcagcagagttcgcgttcgcgcttccatcagcggcacatcaccgcgcgattccacattcaggcgcaccaccggttcggtattggaggtgcgcaggttaaagcgccagtcggcaaaggtcatgctgatgccatcggtgcgatccaccgccagcgcctcacggctaaaatgctgttccacgcggttaatcgcctcaacgggttgcgccagtttgctgttgatctcaccgcttgccggaaacgccgccatccggtcgcgtaccagttcgcccagcgttttatctttcaggcacaccagttcggcgaccagcagccacgggatcatgccgctgtcgcagtaagcgaaatcacggaagtaatggtgggcgctcatttcgccaccatagatggcgtcttccttgcgcatacgttctttaataaaggcgtgtccggttttcgacattaccggcgtgccacctgcggcagtcaccacatcaacggtgttccaggagagacgtggatcgtggatgatcttcgcgccgggatttttttcgaggaatgcttctgccaacaggccgacaatgtagtagccctcaataaactgccctttttcgtcaaacaggaaacagcggtcaaaatcgccatcaaaagcaatgcccatatccgcgccgtgtttgatgaccgcattgcgggtgtcgtcgcggcattccggcagtagtgggttaggaataccgttggggaaattgccgtccggcgtgttgtgcactttgattaattccacgggcgcgccgagggctttaaagcgggcttcaatggcgtccaccaccggacccgctgcgccgttcccggagttgatcaccagcttgagcggcgtgaggtttttgacattgatataaccgaacaggtgatcaacgtaagcgtcacgcaggttgatttgctgatagcgaccgcgtttggtttcatcgacgggaggaaagtcgttggcttcagccagacgctggacgtcgcgcagtccggtatctccgctgatcgggcgagccccctcgcgaaccagcttcatgccgttataatccatcggattatggctggcggtaacttcaatgccgccatccacgccgagatggaacgtggcgaaatagatctcttcggtgccggacataccaatatccagcacgtcaacgcccgcatcctgtaaacctttcgccagcgccagttttaaggtttcgctggtgaggcggacatcaccgcctaacacaatggttttcggtttgagaaattcgccataggcgcgaccaatgcgccaggcgatatcttcattcagttcttcgcctaatttcccgcgaatatcataggctttaaagcaggttaattttttcatatcgttaccctttttcaggcaatagttggccctgaccgaagcggccaattttatttttgtcgttatttacaccgcggtttcgcattcattgcctgatgcgacgtttacacccgtccgtagcgatccgcgaaacgcaccacatcatcctcttcgagataagagccggagcgcacttcaattaaatcgagcggaattttccccgggttttccaggcaatgcgtcgcccccagcggaatataaatggactcgttttcaccaagcagtttgatatcaccatcaatggtgacttttgccgttcccgcgacaaccacccagtgttccgcgcggtgatggtgcatctgtaccgacaagccctcgcccggtttcacggtgatgcgtttcacctggtagcggtcgcccgcgtcgatagagtcatatttgccccacggacgatacacttcgcgatgcacccgatgctcatggcgaccatcggctttgatctgctcgaccacttttttcacatcctgtaccgcgttacggtcggcaatcagcaccgcatctttggtctgcaccactaccagatctttcaccccgacggtggtgaccaggccagattcagcatacacatagctgttttcagttttgtgattaatcacatcgccgtggcaaacgttgccctcggcggtgtgggcgctgatctcccataatgaagaccaggagccaacatcgctccagcccgcatccatcggcaccacaacagcatctgccgtacgttccatgaccgcgtaatccaccgactcttccgggcaggcgagaaacgcttcttcatccacgcgaataaaattgagatccggatcgacggcgctcatcgctttttcacaggcatcgaggatatccgggcgatattttttcagttcttcgagatagcgtccggcgcggaacaggaacataccgctgttccagtaatattcgccgcttgccacataggcctgagcggtttccagattcggtttttcgacaaactgcgccacttcaaaggccaccatatcctgctcacccgcagacacttcaccgcgacgaatatagccataaccggtttctggtagatccggcacaatgccgaaggtcaccagcttgcccgcttcggcatatggcatggcattacgcacggcggcacggaacgcgtcttcatcggcaatcacatgatccgccgccaataccagcattaacgggtcgctctccgggctatgacgttttgccgccagcgccgccagcgcaatggcaggtgccgtgtttcgccctgccggttcgagaataatgttctcggtaagtttgttcagttgacgcagctgttccgcgacaataaagcggtgctgctcattgcaaatcaccaccgggctttcgcactccacgccgttcaggcggcagatggtggtttgcagcatggtgagatcgcctttcaggcataaaaactgcttgggataaagtacgcgggaaagcggccataagcggctaccggagccacctgccatcacaactggatagagtttcgactgcgccataattatccccgaatatcatttataaattgacgtaacacgttctctttatcgagcgtgcgttcggcatattcacgtgccaccgtgttgtgtttgggcagcaggagcgcctgacggatccccgccaccagcgcctcgaccgattccggttcaacgcaaaccgcaatgcccggaaaggtttcgcaaagctgccccagttctgtgtaggcttcagcagtaatcaccgcgttaccgcctactgccagaatattggtcagtttcgacggcaatacggcatctgccgcgccgcgtttttgcaccaccagatggcaatcgcccatcttcagcagtgcgggtaaagcgtcatacgattgcagcgggaaaaattgcatgttgcgcagtccacgctgctgcgccattttttccagccgcgctttgccgccgccctgcccgacaatggcaaaaatcagcggttcatcgcgcagacgatcggcagcttcaataacgttttccagcccctgcttttcaccaatattgccggagtaaagaatgatttttttgttatccggcaggtcaagctggttacgaagggcatcaacatcggcatctgcaacatgctgaaaacgggcaatttccgaccagttggggaagaagatgacgttttccgccgccacgcctttttcgatggctttattcatcatcgaacgcgaaatcgtggagacgttatcgacgttatgcagtccgctacgttcgaacgccgttgccagctgtgccactttgccgcctttgccttttccggcaaggcccagccccagcatggcgtccacttcgtaatcctgaatatgcagcacggtacgcgcaccagagagtttcgccagcaggcgcattcccggcgcgcaaaacagcgttggcaccacgccaataatgcgatccggcttccagcgacgttgcgccatcagcggaaagaaactgctgacggcaaaactgcccagatgcaacaggcgtttcagggtgctcggctgttttggcacatacagcgggcagcgccacaccgtggcggccccctcttctcgtttgtagcgccaggcggaatagttctcgcccacctgccattgcgggtagtaaggcggtgcggtaatgacccgcacctcatgaccttgtgccgccagccattccaccatctcgccggtgtatttgccgatgccggttaactccggcgagtagttaatgccgtagaccagtattttcataatccgggtactccggtacgcttctcagcgagaaaataggcgcggctgttagcatgaacattatcactggcgagcagcgcgtccgacgtcagccagcggtaatcgtcatgctgctcatccggcagtaacagctcttcttccgatactctgaagcgaaaaccgagcaccacatagtgagtggtgaaatccgtgccagagaagttatcgtcataaaagtgctgccagacaccgtaaaactggcctgctgttatcggcaaacgcagccccagttccgccatcgtcagccgctcaaatgcggcttccagcgtttcgtctttctgcacgcgccctcccggcacaaaccagtaaccctgcgccgggcggttggttcttttgccaagcagaaactcgccgcgactgttctcgacaataaagtcgagagagacaagcggagtggagcgcactaccgtggcaaagtcttcctgacgtaaaaacatcattacccccgaaagcggtcttgattctcaaggaaccactggtaagtgctggcaagccccgcttccagtgagatttcgtgataccagccaagctgatgcaggcgcgtcacatccagcagtttgcgcggcgtgccatccggtttgctggcatcaaaaaccacccggcctttgtaacccaccactttggcgatggtttgcgccagctcgcggatagtgcagtcaacgcccgtgccgacgttaatgtgcgacaacatcggctgggtgttctccagccagacttcatgcgccagctccatgacatgaatgctcgccgccgccatatcatcgacgtgcagaaattcgcgcatcggtgtaccgctgccccataccaccacgtccggcgcattctgtgccgtcgcctcgtggaagcgacgcagcaatgctgggatcacatgcgaattactcgggtggaagttgtcgtgtggcccgtacaggttggtcggcatgactgagcggtaatcgcgtccgtactggcggttgtatgattcgcacagtttgatcccggcgattttggcaatagcataaggctcgttagtcggctccagcgtgccctgcaacaactcgctttctgccatcggctgttttgccagtttcgggtagatgcaggacgatccgagaaacagcagtttgttcacgtcgttctgatgcgcggcgtgaatgatgttgctctcaatcatcatgttctggtagatgaaatccgccggataggtgttgttggcaacaatgccgcccactttcgccgccgccagatagacctggtcaatacgttcgctggcaaagaaatcatgcacggcgcggctgtccagcaggttcagctcgtcgcgggtgcgtaataccagttccacatcaccgcgctgttcgagctgccgcctgatggcggaaccgaccatcccgcgatgaccagcaataaaaactcgttgtttactcatgcttatgactccagcgcgatcgccacgtcgtagccgtgagatttcagcagagagtgttttttcgccgcttcgaggtcattagccaccatttcagacaccatctctctgagggtgatttccggtttccagcccagtttttcgtgcgctttggtcgggtcgccgagcagcgtttcaacttcagccggacggaagtaacgcgggtcaacagcgataatcacatcacccggtttaacgcccggcgcgtcatgcccggtgacggaaaccacaatgcccttctcttcaacgcccgtgccttcaaagcgcagtttgatgcccagctgtgctgccgccatttccacgaactgacgcacggagtactgaacgccggtcgcgataacgaaatcttccggctgttcctgctgcagcatcatccactgcatttttacgtagtctttggcgtggccccagtcacgcagggaatccatattgccgaggtacaggcacgactccagcccctgggcgatgttggcgattgcgcgggtgattttgcgggtaacgaaggtttcgccgcggcgcggggattcatggttgaagagaattccgttacaggcgtacatgccgtaggattcacggtagttaacggtgatccagtaggcgtacagtttggcgaccgcatacggagatcgcgggtagaacggcgtggtctctttctgcggaatttcctgcaccagaccatacagttcagaggtggaagcctgatagaaacgagttttcttttccagaccgaggaagcggatcgcctccagcaggcgcagcgtacccatcgcgtcgacgtcagcggtatattctggtgactcaaaagagaccgcaacgtggctcattgcgcccaggttgtacacttcatccggctgtacttcacgcaaaatgcgcgtcaggttagaggtatcactcaggtcgccataatgcagatggaatttcgggttgcaggtgtgcggatcctgataaatgtgatccacgcgctcggtgttgaatgacgatgcgcgacgcttaataccatgcacctcgtaacctttttccagcagaaactctgccaggtaagaaccgtcttgtccggttacaccggtgatgagagcgacttttgacatgtattattcctctgtatttttgaatttattcagtttcaacgcgttcgcgtatcaccactgcgggattcccccggcaaaccacatttgccggaagcgatttaaaaacactgcttcgtgcacccacgacggtgccgtcgccgattgtgacgcctggggcaacaaagacatcggttgccagccagcatttctcgccaatcacaataggcgtggcgttaatggtgaaatgttgacttgcatggtcgtggctaccggtgcataaataacttttttgcgatatcaccgaatgtgcgccaatggttatttcaccgagggtatataaattgacgtcatcgccgacccacgcgtaatcacctaaggttaatttccacggataggtaatttttactgacggacgaataactacgttttttcctatttttgctccgaataaacgtaataaaaaagcccgccagcgatacaatacttgtggcgaccaggcaaatattgttgcctgtactgcccaccataattgcactttaatagcgttgccgccccggaaccctttcggcaccgagaaaccgcttaaatcttgcattggttttccttatattcagactttgttatataaggctttcgtctttgaggtagtacgttggcgtaaatgccaggataattcagcccaaaagccaggcacatgtaatatttgtcgttggacttttttcgcgtcagcacacaattccatattattggtggtagataccccacccatggaaaattcagacaccaggccattgagttttttaaatgcataaccggctttatacattttggctgccagcgcgtagtcggaagaaactttatattccaggtcataacgccattttttcaagccggatacagggaaaaatatcgcctgatgactggcgggcaggctgtgataaatataccagcccggtttggcgctacgtttaattttatgcccgtcgccaaaatccagcagcgcatcgccggtgatcatcacgttatctttttgcatttttaacttacggacaaaatttgcggcattctgatgaaaaatatcgcccgaattgagaaacaacgcgaacttgccttgtgccatcgcaatgcctttgttcatggcgtcgtagataccgttatctggctcgctgacaaagcgtaggttaaagataccattgagattttccagatactcacgggtgccgtcgttggaaccgccatcgacaacaatccattcgaagctgatatcttccacctgcgccagatgcgccagcgaggcatgtgttttgactatcccttcgaggttacgaaacgcgacagtgattatgctaagcaacatgttcttattcttacctcgtaatatttaacgcttttcgcaaaataaacggacagacgattaaaaatgcatattccgggctaaatatcgaaccggtaaaaaacagcgataccggagtaaaaagatataattgcacgcgaaaattgcggttatcaccaaaagcgttgatcatcatttttatcactttccccatgtaccacagtgataaaaacaccgcgaaccaggaaaaataaataatcagcagatacaaaccattgtctatggtttttccgacatccgcaccgttaaatattccgaatgatgcgacatattcataaagtgagccaaatctgactacaccgtcaatatgggtcaaagaataaccgaccatcaccagcggaccgacaatacgataatatgatgacgatccttccgtacctaaatcgcccagacgggtggaaatataaggaaacgcgattaccacaccaaccaggaatacagccagagaaatcaatgctaacggtaactttttcttaatcgcctctttattcagatattgaaatgcccactccagcaaataaaacaggataaaggtcataacccctgaaaacgatccggataatattatccctgcgagaatcatagcatctgttttaggcgttttgataccaaactgtttgatgctgagccaaattgagattaatgccagagcgaaaaatgccggttcgaaataaagtgctgtcgtgcgcttgccgccgaatttaatgaaattcagcacatagctgttgctgtaaatcagatatttcgaaatcgactccataatactgctgccaccggtgaggataatttgtgccatctccaccgccgccagcgccaccaccagcccgaccaccagataaaagaaacgtaatatcttgcgatggttgtgtggcgaaattgttttaaaacgaatactccacaccatgccaataatgatcacaatatagacaaacagcatagttgaagtgacgtatttactggcatccagcgactgaccaaacagatagttaaacgccgtgagtcccgcgccaatccctaaggcaatcatcaattttttaacgctgatgcgttctaaaaacagcagtaacaagacaggtaaaaaagtgacgatggtgatggggaaactttcgccaagctgggcgattttgacgttaaccagcagataaatcagcggcagcaacaggtagctacagattctgatagaagttgacatactcctccagcatctgttgtccactgtaggcggcgcggctgcgttggctgaactcagccagcgtggtaccaaatatcgcctgcgcgatttccggtttgcttaactgcaccagttgcagcacctcttcttcgctgacggttttaccgccggatttttgcaacacttcccgcgccgcatcgctatgggtggcaatcaccggcacgccaatcgatagcgcctcacacaaaatcagcgggtagttatcgacgcgagaactgaataccagcgcatccatctgattgagcgcgctcatcagcttacgtttgtcggtttcaaagccgtgattaaccacgttgccagcggtgaacggcgagaacttaccaaaggtatgcagttcaattttgtcgcccagcgccatcatctcgcgtaccagttgctggttagttttgccgtcgtaacgcagatcatgcgccaccaccgcgattttcggcttgccctgggtttcgcgcaccggaggcaagtccgccagaatcgcttcagttgccatatcaatgccattattgataatccggcaacgccctggaccgtacaggctattgaaagcgtcagccacatgctggctgggggaaataaactgacagcccagcgccagcatctcacggaataactggcgtttgcccgccaccagttggtgtgcgcgatcaatcttcaccggcggatagttatttaaggtcgggcatttctggcagcctgttttccagccttcgcaaccgtcggtaaaggcgcagcgtccggtaacactccagtggtcgtgcagcgtccagaccagagtgacgtccggtttatggtttttcactttttcgcaaaagcgcaccacgctcttaagatttagccagtagctgtgcagcacatgaaaatgcaggaccaccggacccgctgtgcgagtaatggtgcgatataactcattgaaattgccaaacagatcgcgattaaacagacgaaacagagcaatattcgccatcgcggtcatccgcggcgtatgtttgatgacctgcggatagttctgatggctgacgctctctttgccgcctttgccgtaaccgtagacaaaatgtgacgccagcccctgttgcagcgcacgctggtggagatctaacgccacacctgctgccccgccttccgccagtcgcacattaaattgcaaaatattcatttaattaccttcactcgcgctttttctcccaccaccagcgcgttgtccgggacagagtcgagcaccacgctgcccgcgcccacggtgacgttgttaccaagcgtgatatcaccaagaataatgacgttggcaccgagttcgacgccgttgccaatgtgtggacatgccatgttatcggcaccacgattgccgatagtgacgccgtggcgaatggtaaaatcatcccccgctaccacgtttttattgatcacgacggcgtaaccgtgatggatagtaaagcggcggccaatggtcgcggcagcctggatttcataaccgaaaaagcattcggtgataatgcgatacagcaccagcagcggggccgcccacagattgttgaggacgttctttttgcgccacaccgaacaaaaatgagcaacacgataggcaagaaccatgcagcacgggcgtaaactccagctgttggcgcgcagatcttccagcatctttagcgcccccgaataccatcagccagacgtttgccgttacgcaccgacagcagcgtcagcaaagtgcgccaggtcatacgtttattgcggatctggtagagggtaaacagctgatattttttgctggcgcggtcgaatttgtctttgtgcttgcggtaaaagtggaagtacccggagaattttttcggtgacgaggtgatctgcatttcaccgtgattgatatgcaggatctgcgtcgcctcttctactttccacggttcgccgtactccaccaccatccgcaggaagatgtcgtaatcctgtgccgctttcagttcggtatcgaacaaacactctttgaaacgccatgcccaggtaaagacctggttgccaatgatattgcgtttgtagaacaggcggcgtgaatacggcgatttgggatacagcggcaagcttgccggttgggaatagacttcgccctggcaaacgtagtcgttagcgtacaaaaaggcgtgtgtgaccagttgctgtttatgggcgaggaagacgctcagacggttgggtgtccattcgtcatcgtcatcaatcccggtgatatattccccttgcgccagcataatcgcctggttacgtaccgcgcacgccccgctgttaatgtcgttgtgaatgtaagtgatacgcggatcgttgagggcggtgacgtactgttgcagttgttcccaggaggtggagcaatcatccacgatgatcatctcccagttgctgtagtcctggcgcaaaaccgattttattgcccgaatcgccagttgttggcggttccaggtcggcatatagattgagatcagcggattgtttttcataggttgttctcccggcttatgagctggtttgcttgccggatgcggcgtgaacgccttatccggcctacggggcggtgcgaatgcaggcgtcgttatttcgcatccgacttatattcgtattcgtaatagccataatcctgatacgcgctggcgcggcggaagatggagttcagaatcacccctttcaccggaataccgttttgctcaaagcggctcagactggtttccacttctttcaatgtgttgaccgcataacgcgccaccattaacgtggttccgacatgacgaccaacaattgccgcatcggtcactgccagaatcggcggcgtatcaatcaacaccaggtcatagtttttactcgcccagttcaccagttcggcaaagcgttcgctcatcaacagttcagaaggatttggcggcacctgaccgcgcgggatcaggtcaaatttggcaatagaggtcggtttagcagcggtagtaatatcgccctgaccaatcagaatttccgacaggccattaacgttattagtgcccaacagctcgtgggtgtagcctttgcgcatatcgcagtcgatcaacaacacgcgtttattggtctggctgatcaccgccgccaggttggcgcagacaaaggttttaccaattgacgggctaaccccggtcatcatcaacacattgttctgtgcctgcatcatcgcgaagtgcaaactggtacgcagactacggatggcttcaatcgccagatcggttggattccccaccgccagtagctggctctgtttatagcgtttaatccctttgatggttttgacgctatcacgcgctttctgccattccgacagcgggatgctggcatagacgctaataccgtgttcttccagtacttgcgggctttcaatgccgcgattaaacaacgagcgcagcagcacacccacgatagaaagcatcaggccaaggataatcgcgccgaggataatcagccctttcttcggtttcagcacgccaggctgagtgattgccgggtcaacaatgcgcacatcgccgacggtgctggcctcggtgattttcagctcctgctctttattcagcagttgcatatagacctgctgaccagactcgacatcgcgggtcagacggacaatctcctgctgggttttcggcatcgccgttacgcgaccgttaagtttggctttttcgtcttccagcgcctgacgtttctccagcagcgtgcggtacgccgggtgaactttggtgtacagcttggagatttccgcctctttaaaggtcagttcgttcaactgcgcatcgatgttcaccatcgaatcgagcaccgcttttgcttccagcggcagatcaacagaatctttatcctgacggaaggcattcagtttgttttcggcaacatccaagcggctacgtacttccggtaactgttgcgcgaggaaggcgaggcttttcgacgcttccgccgatttgcgctcaatattttgttcctgatagttacgggcgatgctgttaagaatgtcgcggatctgttcacgatcttcaccggtataagtcaggctcaaaacgccagcgtctttgccgttctccgttaccgtcaggctgttttgcagttggttgatcatccccagcgtggagtatttggtgacggtaaactcactgcccgggctggcgtgaatggcttcaaccatcagcgtgacgccttcttttttcagcatctggcccgcttgcccccgggcgctaaagccgccgtcgctgctcagggtgtagtttttgttgtccagcacattaagcgtaaacacctgatccgccatctctttcgggcggttaaaggtggtcactttcaccgtctcgttctgacgtcccatcaggcgatcccagcccgcaccgaaaatcgggaacgtgtttttgctcactgcaatatcgaggtcgagatcgtccaccgttttaccaagcaccagacgcgaacgaatcaactggatctcggcgtccgatgcaggcggtttgttggctaatgccgaaccaatgtcctgcactaacgaattgccgctgttttgctcgatttgtaccagtgcgtcggcactataaatcggcgtggcgaagaaggtgtaaaccacggcacagagggcgaatacggtggtgatgccaatcacccaccagcgcgcttcaatgacggtgccgaccaggcgaccaatatcgatttcatcactgcccgttaccggagcggcatgttgttttactttttctgtcattcttatacctgctctgcgttcaatgcctgcgcccactggcgggcagaccgttcaagtaatgtgtacaccgctgcaaacgtttcccggcttttgcgatacggatcggggatttcacattcgttatcccagtgaccaaacagcatcactttgccgcgcatctccggtgccatctcgcataagcgttcgatatggcgcttttccatggtcaaaatcaggtcgtagttgcgacacagacggcggctgatttgacgggcacagtgaccttccagagacagttgatgttctgcggcgacgctgatagcggtaggatcagcgcccttaccgaccagcgcgccgagtccagcggactccactttcagctccgggtgataacgttgcagtaagcgttccgccgtcggggaacggcaaatattgccgacacagacaactaagatgttgttaaacatgacgattaccagttatgaatgtcgctggctgtatccgtcatgtaacggacaccgctaatagttggcagcaactgattgatcagacggttccagcgggaaaccggggcggtggtgacatacaccacgtcataaggttgcaggcggaattctgtcgccatcaccagcgacgtggcatcggacatatccagctggtagatattggcaatcttgccgttacgcccgccctcgcctttcagcggacgaatgacaaagatgccgctggcgttggaggtggtcatgtcgatgccttcagcattgcccagggcttcagtcagggtcatgccgctaaagtccattttcagggtgctctgtttcttcacttcacccatcacaaatactttcagatcatcattacgtggcacgtagagaatatcgccggggtaaagcaggcgattctggttgaggtcgccgttttgcatcagcgcctgcaaagaaatgcgctcttcacgaccattgtgtgttagcaccacgttgcgccagtcagcggtgtcggtcaggccacctgcggcgttgatggcgtcgagaatagtcagtggcacgttggtgatcgcctgttgaccggatttattcacctgaccggagatataggccttttgtgagcggaaggcggcgatattaacgtccacctgcgggtcagcgatgtacgtcgctaagcgcccggtaatatcactgcggatttcagcgagcgttttcccgactacgtggaccttgccgatatacgggtaaaacatagtgccgtcaggctgtacccagttgccggtgtcgctggagctgcggtactgaccggctggcgtggtgagttccgggtgatcccagacggtgacattaagaacgtcccccggcccgacgcgatactggtaattcgcgatctcactttccagcgtcatattggggcgcgctacattcgggcgtgggcgtaattggtcaatcaggcgcggggtcagcggataaacattcaccattttgtcgagatcgaaatcagcgtcctgctgtttgatgacgtctttgcccatcgtcgacatattgctgcccggaagtactgtgcaaccgcttatcaaggttactgacaccaataatggcatcaatttcattttggatttcatcattgtttatttatcactttggcagagtaattatcctgtgcactattaatagcaatgtcgccatgcacatttaccttgcagttaattgaataaaaatttaactggcatcagtcctaaaaaaattgatttcatccgcaggctattgacagaataattcagactggtctttcaggcatccagacacgctaccgcccctggctttttagctaccaatacactgatttagtttaatttttcacaccctctcagcatgcagtcgttgatgagaaagggttattacggaaattaacttccgaatataaggtgacattatggtaattgaatattggctttccaataatgcaggaggaagtgttacagctaacggaatagcaggcaagataacaattcggtaattggctatttttaagaattatattaagtgtcattcaatatggtttttaggagtttctttaggttgacaatatttaatatagtgtctccacatgcgatatttcttaaataatgttttattattaccacttttaattcagggataatgtgaggttattaccctcaaataatatgagataaatagtgctgcaacattgcatttttgccccgatttatccatgatcgaattgtgacatttgtcatacaacgaataggttttgtacttactatggaatggattgccgatccgtctatctgggccgggttaatcacgctgattgtgatcgaactggtcctcggcattgataacctggtctttattgccatcctcgccgaaaaactaccgccgaagcagcgtgaccgcgcacgggttaccgggctgctgctggcaatgttaatgcgcctgttactgctggcgtcaatctcctggctggtcaccctgactcaaccgctgttcagcttccgctcgtttacctttagcgcccgcgacttaatcatgctgtttggtggtttcttcctgttgttcaaagccacgatggagctgaacgaacggctggaagggaaagacagcaataatcccacacaacgcaaaggtgcgaagttctggggcgtggtgacgcaaattgtggtactggacgccattttctcactcgactcagtgattaccgccgtcgggatggtcgaccatttactggtcatgatggccgccgtggttatcgctatcagcctgatgttgatggccagcaagccgttaacgcaatttgttaacagtcacccgacgatcgttattctctgcttaagcttcctgttgatgattggctttagcctggtggcagaaggtttcggcttcgtcattccgaaaggctacctgtacgctgccattggtttctcggtgatgatcgaggcgctcaatcagttggctatctttaaccggcgacgttttctttccgctaaccagacgctgcgccagcggactaccgaagcggtaatgcgcctgcttagcgggcaaaaagaagatgcggaactggacgccgaaaccgcgtccatgctggtggatcatggtaaccagcagatctttaatccgcaggaacggcggatgattgagcgggtacttaatcttaaccagcgtaccgtcagcagcattatgacgtcgcgccacgatattgagcatatcgatctcaacgcgccggaagaagaaatccgccagttgctggagcgaaatcagcatacgcggctggtggttaccgacggtgatgacgcagaagatttgctcggtgttgttcacgttatcgacctgctacaacagtctctgcgcggcgaaccgctcaacctgcgggtgttgattcgccagccgctggtgttcccggaaaccttgccgttgttacctgccctggagcagttccgtaatgcccgcacgcactttgcttttgtggtggatgagtttggctcggtggaagggattgtgacattaagtgacgtcactgaaaccattgccggtaacttaccgaacgaagtggaagagatcgacgcccgccatgatattcagaagaatgcggacggttcctggacggcgaatggtcatatgccgctggaggatctggtgcaatatgtgccgctgccgctggatgaaaaacgtgaatatcacaccattgccgggctgttgatggagtatttgcagcgtattccaaaacctggcgaagaagttcaggtgggggattatttgcttaaaacgttgcaggtagaaagccatcgcgtgcagaaggtgcagattataccgctgcgtaaggatggcgagatggagtacgaggtgtgatggtatcggtcattttacccaatagccgaaaggaataagatgagggaaccgcgccatcggcgatttaccgccgggagcccgggttgccagggtggtggagattgagccaccctggcacgttcaccggcttgagcgttccatagtagcgaggaacatcaagtgaacggaacagccttcgatcttacatattcagaatataatgatgccgccacgaacgcctgatgcgacgctttacgcgtcttatcaggcctacaggactggtcacctggtaacctacatcttctccagcaacttcttcacatctttgccattacgggaatctttattccgctcggcccagtcattcaggcgacgtttcgcttcgtcctgtagatgtttgcgcagtaactgatccacttgcaggctgtaattgagttgctgccagttgccataaacccgcagcggtactggcgtttctttcaggaaatcaatcagtttgctttccccgttccagccacccacgacccgaatatcaaactgggtgtcgcaggtttgatctgccagattcaacatgccttcccctgtcagcgccagcacaggcgattgaccttgcatgtcgtttaacgtcacgacgccatccttcaacgtcaaatcggtggtaaagcggtcaagccgcgtcacgttatcaaagttttcagcggccttcacatcaccgccattacgctctaccgcttgctgaatcatctgctggaagttcatcccttccatgcgcgtgtcggtcatttcgacatgtgcctgtccttgccagttgtggcggaatgcgtcggcatctatgtcagcaccggagaaatcaccagccagtgacatttttccggtcaacgaaatcggatagttaaacgccttcagaatggtaccaatctcaacgttttccagccgtggctggaagtttatccgcggatttattgatgtcgcgtccagcgtgcccggcagtgaaacctgtccaccgttaagtttgccctgcagttgagtaatttccagcaaacccgacttgttggtcatttgcgtggcaacatctgtaaaattcattccgcgccagcgcacgttactggcctgcaacaaaatatcagccgtaaagccttgcagtccctgataggccggttcatcaatacgcgaagaaatgaccgggcgcggcaacgttgattggctctgcccctgctgcgcggcaccgttttcaccattcgcggtttcattaagcgggatgaggttgtcaagattcagttgcgggaattgcagcctcagctgccattccggtttctctgtcagcgtaacctgtgcttgcccgcttagcgtactatcattggcggtcaaactaatttggttaaatgaaaggcgtttatgtgactcctgccactgggcctggaaactcccctgcccctgaataccttgttttggtaaatcggcaccctgcaactgccagttaatttgttcaatagccgccgttaaatcatgcggataatcagaagcatctaccgtaccgttaagggatatcgtgagatcgcgctgatcgcgattaacccgcccggagaactcaaatgaaccacgatgttggggatcttgttccatttgcaggcgaatattgcggattgtcacctgctcgtcatcttcatgctggaacaccagcacgctgtccgccaccttaagactggatatatcaaacgaccatccgcgatcgtctgacagatccggcaaggtattgtcgcgcggtgcaaccggagcgtcttcactgcgcaccgcttccgtctgcggcgtcagttggatcactgccccttttagcatcacctgcttaacgctcagttgatgactcagtagtggtaaaagcgccacgtccagacgcatgttgtcggcgcgaaccagtggctggcttgcgccctgggcggtgagagacattcgcccggagaggatactaagctgcggccagacgtgccaacgcagtggcccgtcgagctgcaattgataaccgctacgtgcagcaacttgcttgaccatatagtcgcggaaatcattcggattcaccagcaacactaacgcagataacccggccaccagcacgaccaggagtatcatcagcgtcgtcagaaatcgtctcatggtatcctcaatgggcctgaattagtctttatcgattcggctggctaccgcgccctgctggttgcgatatttcgcatcttcacggcggttgtaaggtcgcaccgccgggccggaaagcggctcaaagctcagcgcaccaattaacatgcccggacgcagcgccagcggcagcttaccggagttgtagaactccagcacaatgcaaccagaccagcccggatcgatgcggtgcgcggtgacgtgcaccatcagccccagacgcgccagtgaggaacgcccgtccagccagcccaccagatcggctggcagcgtcaccgactccagcgtcaccgccagcgccagctctcctgggtgaagatagaacgcctcgccctcgtcgagaacgatctcatcgctcatcacgcggtcaagcgcggcgctcacttcatctttgggaccgctcagatcgataaacgctgccgtgtgaccacggaaggtacgaaatttattgcccaggcgtacatccaccgtcgcgccgttaatacgctccactggcggacgtgggttgatcgacaaacggccttcatcaagccaggcttcaatatctcggtcacacagacgcatggcattttctcctttcgcgcatcactcccttaacgccaattacgtcaagggcatactaggttatcactgaacggtacacaatttatcaagcttattcaaagaactgacttattttcgctttcaatatatcgatcgcgatgcggtttttcccgccgcgcggcacgataatgtccgcatattgtttagaaggctcaatgaattgcaggaacatcgggcgcacggttttttgatattgcgccatcactgaatccattgaacgcccacgctcgttaacgtcacgcttgatgcggcgcatcaggcagatatccagcggggtatcaacgaaaatggagaagttaagttcgtcacgcaaacgcgcatccgtcagcaacaaaatgccttcgagaatgatgaccttcttcggctcaaccgtcaccgtttctttcatacgcgtatgttcaacatagctgtaaaccggcaggtcaattgccgagccgcgtttcaacgcttgtaaatgctcaagcagcagactgtgatccatcgcgctgggatggtcgtagttggtcttaacgcgttcttccatcgacagatggctttgatctttgtaatagcagtcttcgggaattacgccgatgtgttcatcaccgacttgctcacgcaattcacgataaagggtactggcaataagactcttgccggaagccgatgcgccagcgataccgataatgacgcactgatgagactgatcagtcatatatttagcgacctgattaacctggatgttaggaagggggcgacgaagcgccaaacgcggcaattatagggatttcatccgtctgataccagtcgaatagcgttgccgcgcgctcagagttaattgttgacaaagaattcccgggggcaaattacgttgatcagttttatgtaaggtaaaaaatgttaaacgcagttgcgcaaattatccgcctttacgtcactttatgagcaattcgcatataaaatgtaaaacttttgtactagcataaacacagaaacgaatactggcgaccaggtcttgcggataaagcggtaatgagcaaacaatcacagcatgtattaattgccctgccccacccgctgcttcacctggtcagtttaggtttagtctcgtttatctttacccttttctcgcttgagctttcgcagtttggcacccaactcgccccactgtggttcccgacgtccatcatgatggtggcgttttatcgccatgccgggcgcatgtggccgggaattgcgctgagctgttcgctgggaaatatcgccgcatccatcctgcttttttccaccagctcgctgaacatgacctggacgaccatcaatattgttgaagccgtggtcggggcagtgctgctacgtaaattgctgccgtggtataaccccttgcaaaatctggctgactggctgcgtctggcactcggcagcgccattgttccgcctctgttggggggtgttctggttgtcctgctgacgcccggagacgatcctctcagggcatttttgatatgggtactgtcagaatccatcggcgctctggcactggtgccgctgggattgttatttaaaccacactatctgctgcgccatcgcaacccacggttgctttttgagtcgctgctcacgttagccatcacactgacgttaagctggctttcgatgctgtatctgccgtggccttttactttcattattgtgctgttgatgtggagcgccgtgcgtctgccacgaatggaagcctttttgatcttccttaccacggtgatgatggtgtcgctgatgatggccgcggatccctccctgcttgctacgccgcgtacgtacctgatgagccatatgccgtggctaccgtttttgctgatcctgctgcccgccaacatcatgaccatggtgatgtatgcctttcgtgcggaacgcaaacacatttccgaaagcgaaacccactttcggaacgcgatggaatattccgctatcggtatggcgttagtgggcaccgagggacaatggctgcaaaccaacaaagcgctctgccagtttctcgggtacagtcaggaagagctgcgcggactcacctttcagcaactgacctggccggaggatctcaataaagatctccaacaggttgaaaagctgataagcggtgaaataaacacctattcaatggaaaaacgctactacaaccgcaatggcgatgttgtctgggcgttgcttgccgtctcactggtgcgccacacggatggcacgccgctctattttatcgctcagattgaagacattaacgagctaaaacgcaccgaacaggtcaatcagcaactgatggagcgcatcactctggctaacgaagcgggcgggattggcatctgggagtgggagttgaagccgaatatttttagctgggataagcggatgttcgagctgtatgaaattcctccacatatcaaaccgaactggcaggtgtggtacgagtgcgtgctgccggaagatcgccagcatgccgaaaaagtgattcgtgattcgttgcaatcacgctcgccctttaaactggaatttcgcattaccgtaaaagacggtattcgccatatccgcgccctcgccaaccgggtactgaataaagaaggcgaagtcgaacgtctcctcggcatcaatatggatatgaccgaagtgaaacagcttaacgaggcattgtttcaggaaaaagagcgcctgcacattacgcttgattccatcggtgaagccgtggtctgtattgatatggcgatgaaaattacctttatgaatccagtggcggagaagatgagcggctggacgcaggaagaagcgttaggtgttccgctcctgacggtgttgcatattacttttggcgacaacggaccattaatggagaacatttacagtgccgacacctcacgttccgcgatcgagcaagatgtggtgttgcactgtcggagcggcggcagttacgacgtgcattacagtattacgccgttaagtactctggacggcagcaatattggttcggttctggtgattcaggacgttaccgaatcacgcaaaatgctgcgccagctgagctacagcgcctcccatgatgcactgacgcatctcgccaaccgcgccagttttgagaaacaactgcgtatcctgctgcaaacggtaaacagtacacatcagcgacatgccctggtgtttatcgatcttgatcgctttaaagcggtgaatgacagcgccgggcatgcggcgggtgacgctttgctgcgcgaactggcgtcgttaatgctgagtatgctgcgttccagcgacgtgctggcgcgactcggtggggatgaatttggtctgctgctaccagactgtaatgttgaaagcgcgcgttttatcgctacacgcattatcagtgccgtgaatgactatcactttatatgggaaggccgtgtgcatcgggtaggtgccagtgccgggattaccttgattgatgacaacaatcatcaggcggcagaagtgatgtcgcaggctgatatcgcctgttatgcctccaaaaatggtggccggggccgggtgacggtttacgaaccgcagcaagctgccgcacatagcgaacgggcggcgatgtcgcttgatgaacagtggcggatgattaaagagaatcagttgatgatgctcgcccacggtgtcgcttcgccacggatcccggaagcgcgtaatttgtggctgatttcacttaagctctggagttgcgaaggcgagattattgatgaacaaacatttcgtcgtagcttcagcgatccggcgcttagccatgctcttgaccgccgggtattccacgaatttttccagcaggccgcaaaagcggttgccagtaaaggcataagcatctccctccccctttccgttgccggtttgagtagcgccacgctggtgaatgatctgcttgagcagctggaaaatagccctctaccaccacggttattacatctgattattccggctgaagcgattttagatcacgcagaaagcgtgcaaaaactgcggctggcgggatgtcggatagtgctcagccaggtgggccgcgatctgcaaatcttcaactcgctgaaagcgaatatggcagattacctgctacttgatggtgagttatgcgccaacgtgcagggtaatttgatggatgagatgctgattacgattattcaggggcacgctcagcgactcgggatgaaaaccatcgccgggccagtcgttttacccttagtgatggatacgctttctggcatcggcgtcgatctgatttatggtgaggtgattgccgatgcccaaccgctggatttgctggtgaatagtagttatttcgcgattaactgaggcgtgcttccccatcgcctgatgcgacgctaacgcgtcttatcatgcctacaaatcgctcattccccaggccggataaggcgctcgcaccgcatccggcgaccaacgtcatgcttcgtctggttgccagccttccgtataccagatatgcaacagcgcataagaacgccagggcttccagcgctcggcataacggcggatttgcgccggtgtcattcccggaaatcgctgtttaatcagataatcatccggcaggaaaacatctttcgcctgccagccacgcaaagcaaaataattcgccgtccagcgcccgatacccggaaaagtttgcagcgttttcatcgcctgctccacatcgcccggtattgtcattggtaaggtgccctccagcgccgcatttgccagatgaatcagcgcctctgcccgtttcaacggcatacctaacgcttttaatgcctgcgggtctgctgctgccagccgctgaggcgtcgggaagcagatatactccggaaaatcatccagccgttcgccataaagctgtgccactctggcggtcaattttgccgccatcgccacgctcaccagttggcctaaaatcgcccgcacgccctgctcaaaagcatcaacacagccgggtaaacgcaatccgggccgcgccgcgcctaacctgcccaacgcaccgttaacaatttgtgggttacattgcagatcaaacaggcggctcattttcgccagacactctgcggcaacaggttctaaacctgcacttaaatttatgtgcagagtatggcgggctatatccggaatagcagtcaccacgccgcgatattcgcccaccgccagactacgggcataataactgtccgcgaccgtttccacactgctcaccgcacgggcggcgagaaatcccaacatccacgaccagtcatacggcggctgccagttcagggtatacatcgcatctccttattcatccgctttcagcataaacgttattcagacgctgcgctttgctttcatattccggttgtcgcgacggcaacatttcgctaaagtcacgccccttcttcaccggcatggggattatttcgtgtttattggttttgattacggtacagcaaactgttcagtggcggtcatgcgtgacggtaaaccgcatttgctaaaaatggaaaacgacagcacgctgctgccttcaatgctttgcgcgccaacgcgtgaagcggtaagcgaatggctgtaccgccatcatgatgttccggcagacgacgatgaaacgcaggcgctgttacgtcgggcgattcgttataaccgcgaagaagatatcgatgttacggcgaaaagcgtgcagttcggtctttcctcactggcacagtacattgatgatccagaagaagtgtggtttgtgaaatcaccaaaatcgttcctcggtgccagcggcttaaaaccgcagcaggtagcgctgtttgaggatctggtctgcgcaatgatgttgcacattcgccagcaggcgcaggcacagctgccagaagcgattactcaggcggtgattggtcgtccgatcaacttccaggggctgggcggtgatgaagcaaacacccaggcgcaagggattctggaacgcgcggcgaagcgtgccggattcagggacgtggtattccagtacgagccggtcgcggctgggctggattacgaagccaccttgcaggaagaaaaacgggtgctggtggtggatatcggcggtggtacgactgactgttcattgctgctgatggggccgcagtggcgttcgcgtctcgatcgtgaagccagcctgctgggtcacagtggttgccgtattggcggtaacgatctggatatcgcgctggcgtttaaaaacctgatgccactgctgggtatgggtggcgaaaccgaaaaaggcatcgccctgccgatcctgccgtggtggaatgcggttgccatcaacgacgtacctgcgcagagtgatttctacagtagtgccaacggtcgtctgcttaacgatctggtacgcgatgcccgcgaaccggaaaaagtggccctgttacagaaagtctggcgtcagcgtttaagctatcgcctggtgcgtagcgcagaagagtgcaaaattgctctttcaagcgtagcggaaacccgcgcctcactgccgtttatcagcaatgaactggctacgctgattagccagcgagggctggaaagcgccctcagccagccactgacgcggattctggaacaggtgcaactggccctggataacgcccaggaaaaaccggacgttatctacctgaccggcggtagcgcccgttctccgctgattaaaaaagcgctggcagaacagttgccgggcattccgattgcaggcggcgatgactttggctccgtcaccgccgggctggcacgctgggcggaagtggtgtttcgttaattgaaaaatggctcagcagcggcttaaatctgcctgcgcctgagccagtttttctgctgcctgacgtaacggttccatcaacggcatggtccgtgctggagcatgaaggcggaatcgctgcaactctgtcgcgccgactgtcaacgccgattccagccgatgtcgtttggcggtcattttcgccattaccgcttgtctgtctgctggcgttatcgcttcattcggcctgaacacaaaacggcgttcacagctcgctttccagtcgataaccgcctgggtcagatggtcgccaaaccctttcacttgcttaacgccacgacgggtaacatctgcggctgtttcaataccaaaagaccgtaacgccgctttacgcgcagggccaacgccgggaatagaggcaacatcaataaaaaatccctccagaaacttctgcttctgccgttcccttgcagtgtcatgaagtgctgccagagcgcgtttctcttcttccggtaacccgagaatttcgtccttcattttttcgagcatcgtccgtttggcgataaaaccttccaggccgcctacctgctggatctggcggactaaatggtcatagtccattttcgcacgattaaatgcctcacggcgttgctgaacttctgctttgtacgctttgcttgtcagactgccaataatccagatagccgccagcacaggaaccaaaataatataacgcggttctgcctgaaggccgcaaagcagcagcgataatgctgacagtgcgatctcaagcagaatgatgtattcgcgccgtaacaggcctaaaggaagcggcctgccagtcggttggaaatgatcgggtaatggcagttgcaatgctggcggtgctactgacgccatcaccatcgcccagactttcgccagcacaaaattcccgccggtggtaatgacctcttcgccgagatcaataaaatagataacaccttgattatccagcgcacaccacgggcagtcagtcaaatgagcggggtaaacatgcattgctgaaacgatacatttctttaactgttggcgtagagagtccagtgccgctacccacgctttagccgtcggacgcccggttgccacgccactttccgtgaatgcctgctgaaacatggcttcaacatcactcggtaacatcgatagcggaatagatcgtggcggcggttttaaaccacgtcgctgattatctgacgcgtaggcataacggaaatgggtaatatccgtctccagcgcattacccgcatcagagataagcggcacaccagaataaggatgccgcccaccaaacaagacgtgaaaaattagcaacgcaaggccaaaattatcgtgattttctgtgcgttcaaaaccgacaaatgatggcaaggtttgtagctctggcggcgtaaaatgcgacacgccgacttcgcataaatgcagtgtgccattggcgttaatttgaaaggagtcgctatcaatcagtaccactttgctgtcgcgacctaccataaaactgttctggtttacgtcacccacgacgtgcccgtgctcgtgaaccgtagcaaaagatgaagcaatattgcgcgcaacatagagtagaaaatcccacgcacaatgagggtaactctggcgacgatgtgccgggctatagatcatatgaatcggttctttaccagaaacttttggcatcataaaaccgataacttttccgcctcgtccaccgtgaagcgttgcctgcggccaggcgacataattcaacaactgcgcgtcagctgtcgcagccataaaggcaagtttgtcctgttttaaggcgggtggcggcgtgtgataaatcttggcgacgctatcgacaaactcctcgatatcataaaccgcgccttcaccacctttgcccagttcacggccaagagtggtcaattcacctgtcgatgtaaatacttttatatttgttttcataatatttcgcgggtagttatattatatttcaatgaataataacaactaaccattaaaattatttctatatggggaaaacccactcaagaataaaaatgataatgcaattttatcaggatacaattcaatttcggcctgataatgattaacttccacaggtttttgctaactttgactacaaagggattctggagaaaaaatgaaaaagatattacttatgttgagtctgctattttttactaccgcgggctttagtgaagtttcggatacgttagtgacgggaggttatgataaacaagcgatgtctgacgcgattaaacatgcgcggaaagaaaccgataaattcatcgaggttatgaataaaaaagatgccgatactttcgcagtcaaagccccgataaccgatcacggaagaaccgagcatttctggcttacggatgtcacttattctaacggcatgtttattggcgtaatcagcaatgaccctggtattgttacaaacgtagaatatggccaggagtggaaaatcaagaaagaagatatttcagactggatgtatacgcgcggggataaaatttacggcggttataccattgatcctttattggtcacctatccaaaagaagaagccgacgagctaagagcaaaattagttcgctaatcagccgttatatttattgtttaaactggcggttgaattgttgtcttcaaccgccatgagaaactcactctgcccacagcgccagtgccaacgttttatcatcatccgtacgctcgtttaccgccgggctggacaaaaactgctttaacaattcaggtaataaatcgagttgttcctgcgttgctgccgccagtccattgaaaaacggggtaaagaaaggcacatgaggagaattatccagcatatttaacgccagtcgctggataccatccgtaaatgctgcaactttgtgcgcacgcccagtgctggtgaaagtttccagtctggaaacggcatcttcgtcggtaatgaagtgcgtcatgttggcatattcacccgccatcggcgtgagaggcaattgcagaccgtgacccaaatctaccaccacgccgccatcgccaatctgcataatcaaggtgccgtcaggcgatgaaatcagtcccagaaatgtgcaggcaaaatcgcgaaccgctaattctttggcttccgcctcggcaaaaagtcgttgacgaatggtcagtaccatatttgtggcgaggacatcattaagccccaattccccgccctgcactttttgcgacatataagccatcgcttcattgacggcgagcatcgcgccttcgccaccctgcgagacactgcctgcgccatcagcgacaaataccgacaataatggctgctggtcatttaaccaggcaatctgcatctggcaggcatcctgacaaggcaagtccgcgctgatgtgcgacgttccaacggttgatgcatagaccagacgccagctcacactgacgtccagccttttggcgcttccagcacaacttccgttcccggcgtggagcgggaaaccgaacgcagcgaactggataaccagctaaacagttcacggaattgtaatccttgcagaggcaaaggctgacgaacgctaatttgtgccagcgtcttcatatccgccccctgaacaccgatggaaaagaaagcaaaccttttatcttcttccccccgaaacactttgttggctgcagcctgccactcatcggttggtgcaccatcggtaatcaggaaaatccacgggcgataatacgaaataccatttgcacgatactcacgtttccgctcctctaccatatccagggctttggtaatggccgcacccattggtgtatcgccctgggcaaacaggatgggcggaaaaaaattagcggcgctggtaaagggttgttccacatgcaccgggccgaacgtcacaatgccgagttccactctttttaaagccagcggatcagcaagcagttcatcacgaaaggtaaccaatccggcgttaagttcattaataggtctaccgttcatagaaccagaaacatccagcagcaaaatgcaggggcaacgtggttccgggttactggcaaaatcgctggtggcaaacgtgatttgttcgctcataagaaatcctttcttagagaattatcgaggtccggtatcataccgactgcaataatgaaataagagcaaacgaagaaactttcagaattaggcccggcggcgcagaaaattttgctattcgcctcgcaagaacggagagccgtcgattgacactaagggcggagtgacataatttcaggagtgagggttagggagaggtttccccctccccctggtgttcttagtaagcctggaagctaatcactaagagtatcaccagtatgatgacgtgcttcatcataaccctttccttattaaaagccctcttctccgggagaggctttcccgtttcagcgtcccgctgaaatcatcggcttacctcctttcgccctgaatgcagtctatcgctaacgcgtgaataaaatagtttcctctgtgattattgcgtaacgactcgcaaagaatatttgctggcaggatcgcagactacaaagcctgcggattgacaatcttatcgtgaaggcatactttcaggagtgagggtagagcggggtttcccccgccctggtagtcttagtaagcggggaagcttatgactaagagcaccacgatgatgagtagcttcatcatgaccctttccttatttatggccccttcctcgggaggggctttcccgtttcagcgtcccgctgaaatcgtcggcttacctcctttcgccatgcaagcagtctatcgctaacgcgtagataaaatagtttcctgtgttattactggatgcgtgctcgcaaatgtgcccgtcattcagacgattccagacagtgtttcataattcctccatttttctcccttattggctggctacactagtatcattccgcgaaacgtttcaggaagagaaactcttaacgatgaaaggtagttataaatcccgttgggtaatcgtaatcgtggtggttatcgccgccatcgccgcattctggttctggcaaggccgcaatgactcccggagtgcagccccaggggcgacgaaacaagcgcagcaatcgccagcgggtggtcgacgtggtatgcgttccggcccattagccccggttcaggcggcgaccgccgtagaacaggcagttccgcgttacctcaccgggcttggcaccattaccgccgctaataccgttacggtgcgcagccgcgtggacggccaactgatagcgttacatttccaggaaggccagcaggtcaaagcaggcgatttactggcagaaattgaccccagccagttcaaagttgcattagcacaagcccagggccaactggcaaaagataaagccacgcttgccaacgcccgccgtgacctggcgcgttatcaacaactggcaaaaaccaatctcgtttcccgccaggagctggatgcccaacaggcgctggtcagtgaaaccgaaggcaccattaaggctgatgaagcaagcgttgccagcgcgcagctgcaactcgactggagccggattaccgcaccagtcgatggtcgcgttggtctcaagcaggttgatgttggtaaccaaatctccagtggtgataccaccgggatcgtggtgatcacccagacgcatcctatcgatttagtctttaccctgccggaaagcgatatcgctaccgtagtgcaggcgcagaaagccggaaaaccgctggtggtagaagcctgggatcgcaccaactcgaagaaattaagtgaaggcacgctgttaagtctagataaccaaatcgatgccactaccggtacgattaaagtgaaagcacgctttaataatcaggatgatgcgctgtttcccaatcagtttgttaacgcgcgcatgttagtcgacaccgaacaaaacgccgtagtgatcccaacagccgccctgcaaatgggcaatgaaggccattttgtctgggtgctgaatagcgaaaacaaggtcagcaaacatctggtgacgccgggcattcaggacagtcagaaagtggtgatccgtgcaggtatttctgcgggcgatcgcgtggtgacagacggcattgatcgcctgaccgaaggggcgaaagtggaagtggtggaagcccagagcgccactactccggaagagaaagccaccagccgcgaatacgcgaaaaaaggagcacgctcctgatgcaggtgttacccccgagcagcacaggcggcccgtcgcgcctgtttattatgcgtcctgtggccaccacgctgctgatggtggcgatcttactcgccgggattatcggttatcgcgccctgcccgtttcggcgctgccggaagtggactatccgaattaataataaattcaggtggtcacgctctacccaggtgccagcccggatgtcatgacctctgccgttaccgcgccgctagaacgccagttcgggcagatgtctggcctgaaacagatgtcgtcgcaaagttccggcggtgcgtcagttatcactttgcagttccagctaacattaccgctcgatgtcgccgagcaggaagtgcaggccgcgattaacgctgcgaccaacttgttgccgagcgatctgcctaacccgccggtttacagcaaagtgaacccggcagatccgccgatcatgacgctcgccgtcacctcaaccgccatgccgatgacgcaagtggaagatatggtggaaacccgcgtcgcgcagaaaatctcgcagatttccggcgtcggcctggtgacgctttccggcggtcagcgtccggctgttcgcgtcaaacttaacgctcaggcgattgccgccctcggcctgaccagcgaaaccgtgcgcaccgccattaccggcgctaacgttaactcggcaaaaggtagcctcgacggcccttcccgtgcggtcacgctttccgcgaacgaccagatgcaatccgccgaagagtatcgccagctaatcatcgcctaccagaacggcgcgccaattcgtctgggcgatgtcgcaactgtagagcaaggtgcagaaaacagctggctcggcgcgtgggcgaacaaagaacaggccattgtgatgaatgttcagcgccagcccggtgctaacattatctccaccgccgacagcattcggcagatgctgccacagctcactgagagtctgccgaaatcggtgaaggtgacagtgctttccgatcgcaccaccaatatccgcgcatccgtcgatgatactcagtttgaattgatgatggctatcgcgctggtagtcatgattatctacctgtttttgcgcaatattccggcgaccatcattcccggtgttgctgtaccgctgtcgttaatcggcactttcgcggttatggtgtttctcgatttttcaatcaataacctgacactgatggcgttaactatcgccaccggattcgtggtcgatgacgccatcgtggtgatcgaaaacatttcccgctatatcgaaaaaggcgaaaaaccgttggcggcggcgctcaagggcgcaggtgaaatcggctttaccattatctcgctgaccttctcactgattgcggtgttgatcccactgctgtttatgggcgatatcgtcgggcgactgttccgcgaatttgctattaccctggcggtagcgattttgatctcagcggtggtgtcgctgaccctgacaccgatgatgtgcgcgcggatgctcagccaggagtcgttgcgtaaacagaaccgcttctcccgtgcctcggaaaaaatgttcgacaggataatcgccgcctatggtcgtggactggcgaaagtgctgaatcatccgtggctgaccttaagcgtggcactcagcacgctgctgcttagcgtgctgctgtgggtgttcattccgaaaggtttcttcccggtacaggacaatggcattattcagggcactttgcaggcaccgcaatccagctcctttgccaatatggcccagcgacaacgccaggtcgcggacgtgattttgcaggatccggcagtgcaaagcctgacctcatttgttggcgttgatggcactaacccgtcgctgaacagtgcacgtttacaaatcaacctcaaaccgttggatgaacgtgatgatcgggtgcaaaaagtcatcgcccgtctgcaaacggcggtagataaagtgccgggcgtcgatctcttcctgcaaccaacgcaggatctgactattgatactcaggtcagccgcacccagtaccagtttaccttgcaggccacgtcactggatgcgctcagtacctgggtgccacagttgatggaaaaactccagcaactgccacagctttctgatgtctccagcgactggcaggacaaagggctggtggcgtatgtcaatgttgatcgcgacagcgccagccgtctggggatcagcatggcggatgtcgataacgccctgtacaacgcgtttggtcagcggctgatttccactatttatactcaggccaaccagtatcgcgtggtgctggagcacaacaccgaaaataccccaggcctcgcggcgctggataccattcgcctgaccagcagcgacggcggcgtggtgccgctaagctcaattgccaaaattgagcagcgttttgcgccgctctccatcaaccatctggatcagttcccggtaacgaccatctcctttaacgtgccggataactattcgctgggcgatgcggtgcaggcgattatggacaccgaaaagacgctgaatctgccggtggatatcaccacgcagttccagggcagcaccctcgccttccagtcggcgctgggcagcactgtctggctgattgtcgcggcggtggtggcgatgtatatcgtgctcggcattctgtacgagagctttattcacccgatcaccattctctcgacgctacccaccgcaggggttggcgcactgctggcgttgctgattgctggtagcgaactggatgtgattgcgattatcggcattattttgctgatcggtatcgtgaagaagaacgccatcatgatgatcgacttcgcgctggctgctgagcgcgagcaaggcatgtcgccgcgcgaggcaatctaccaggcttgtctgttgcgttttcgtccgatcctgatgaccactctggcggctctgcttggcgcgctgccgctgatgttgagtaccggggtcggcgcggaactgcgtcgtccgttaggtatcggcatggtcggcggtctgattgtcagccaggtgctgacgctgtttaccacgccggtgatttatttgctgttcgaccgcctggcattgtggaccaaaagccgctttgcccgtcatgaagaggaggcgtaagtgaagttttttgccctcttcatttaccgcccggtggcgacgattttactgtcggttgccattaccctgtgcggcatactgggcttccgtatgctgccggtcgccccgctgccgcaggtcgattttccggtgattatcgtcagcgcctcgctgcccggtgcgtcaccagaaacaatggcgtcttccgttgccacgccgctggagcgctcacttgggcgcattgccggagtcagtgaaatgacctccagcagttcgctcggcagcacgcgtattattttgcagtttgattttgaccgggatatcaacggcgcagcgcgtgatgtgcaggcggcgatcaacgctgcacaaagtttgctgcccagtgggatgcccagccgcccgacctatcgcaaagcgaacccgtcggatgcgccaattatgatcctcacgctgacgtccgatacttattcgcagggtgaactgtacgatttcgcctcgacgcagctggctccgacgatttcgcaaatcgacggtgttggtgatgtcgatgtcggaggcagctcactgcccgccgtacgcgtcgggctgaatccgcaggcgctgtttaatcagggcgtgtcgctggacgacgtacgcaccgccgtcagcaatgccaacgtgcgtaaaccgcagggcgcgctggaagatggcactcaccgctggcagatccagaccaatgatgagctaaaaaccgccgctgaatatcagccgttgattattcactacaacaacggcggcgcggttcgtctgggcgatgtggcgacggtgaccgactcagtgcaggatgtgcgcaacgccgggatgaccaacgccaaaccggctattttactgatgatccgcaaactgccggaagccaatattatccagacggttgacagcatccgggcaaaattaccggagttgcaggaaaccattccggcggcgattgatctgcaaattgcccaggatcgctcccccaccattcgcgcctcgctggaagaagtcgagcaaacgctgattatctcggtggcgctggtgattctggtggtgtttttattcctgcgctcgggtcgcgccactattattcccgccgtttcggtgccggtttcgctgattggtacgtttgcggcgatgtacctgtgcggattcagtctcaataacctttcgttaatggcgctcaccatcgctactggtttcgtggtggatgacgccatcgtggtgctggaaaacattgcacgtcatctggaagcgggaatgaaaccgttgcaagccgcactgcaaggtactcgcgaagtcggttttacggtgctgtcgatgagtctgtcactggtggcggtgttcctgccgctgctgttgatgggcggattgccgggccgactgttacgcgaatttgccgtgacgctttctgtcgccattggtatatcgttgctggtttctctgacattaacgccaatgatgtgtggctggatgctgaaagccagcaagccgcgcgagcaaaagcgactgcgtggttttggtcgcatgttggtagccctgcaacaaggctacggcaagtcactaaaatgggtgctcaatcatacccgtctggtgggcgtggtgctgcttggcaccattgcgctgaatatctggctgtatatctcgatcccgaaaaccttcttcccggagcaggacactggcgtgttgatgggcgggattcaggcggatcagagtatttcgtttcaggcgatgcgcggtaagttgcaggatttcatgaaaattatccgtgacgatccggcagtggataatgtcaccggctttacaggcggttcgcgagtgaacagcgggatgatgtttatcaccctcaagccacgcgacgaacgcagcgaaacggcgcagcaaattatcgaccgtctgcgcgtaaaactggcgaaagaaccgggggcgaatctgttcctgatggcggtacaggatattcgcgttggtgggcgtcagtcgaacgccagctaccagtacacgttgttatccgacgacctggcggcactgcgagaatgggagccgaaaatccgcaaaaaactggcgacgttgccggaactggcggacgtgaactccgatcagcaggataacggcgcggagatgaatctggtttacgaccgcgacaccatggcacggctgggaatcgacgtacaagccgccaacagtctgttaaataacgccttcggtcagcggcaaatctcgaccatttaccagccgatgaaccagtataaagtggtgatggaagtggatccgcgctatacccaggacatcagtgcgctggaaaaaatgttcgttatcaataacgaaggcaaagcgatcccgctgtcgtatttcgctaaatggcaaccggcgaatgccccactatcggtgaatcatcagggattatcggcggcctcgaccatttcgtttaacctgccgaccggaaaatcgctctcggacgccagtgcggcgatcgatcgcgcaatgacccagcttggtgtgccttcgacggtgcgcggcagttttgccggcacggcgcaggtgttccaggagacgatgaactcgcaggtgatcctgattatcgccgccatcgccacggtgtatatcgtgctgggtatcctttacgagagttacgtacatccgctgacgattctctccaccctgccctcggcgggcgttggagcgctgttggcgctggagctgttcaatgccccgttcagcctaatcgccctgatagggatcatgctattaatcggcatcgtgaagaaaaacgccattatgatggtcgattttgcgcttgaagcccaacggcacggtaacctgacgccgcaggaagctattttccaggcctgtctgctgcgttttcgcccgattatgatgactaccctggcggcgctgtttggtgcgctgccgctggtattgtcgggcggcgacggctcggagctgcggcaacccctggggatcaccattgtcggcggactggtaatgagccagctccttacgctgtataccacgccggtggtgtatctctttttcgaccgtctgcggctgcgtttttcgcgtaaacctaaacaaacggtaaccgagtaaatgacagatcttcccgacagcaccaattaataataattggcaattgtggattgtggctttcggcttctttatgcagtcgctggacaccaccatcgtaaacaccgcccttccctcaatggcgcaaagcctcggggaaagtccgttgcatatgcacatggtcattgtctcttatgtgctgaccgtggcggtgatgctgcccgccagcggctggctggcggacaaagtcggcgtgcgcaatattttctttaccgccatcgtgctgtttactctcggttcactgttttgcgcgctttccggcacgctgaacgaactgttgctggcacgcgcgttacagggcgttggcggcgcgatgatggtgccggtcggcagattgacggtgatgaaaatcgtaccgcgcgagcaatatatggcggcgatgacctttgtcacgttacccggtcaggtcggtccgctgctcggtccggcgctcggcggtctgctggtggagtacgcatcgtggcactggatctttttgatcaacattccggtggggattatcggtgcgatcgccacattgctgttaatgccgaactacaccatgcagacgcggcgctttgatctctccggatttttattgctggcggttggcatggcggtattaaccctggcgctggacggcagtaaaggtacaggtttatcgccgctgacgattgcaggcctggtcgcagttggcgtggtggcactggtgctttatctgctgcacgccagaaataacaaccgtgccctgttcagtctgaaactgttccgtactcgtaccttttcgctgggcctggcggggagctttgccggacgtattggcagtggcatgttgccctttatgacaccggttttcctgcaaattggcctcggtttctcgccgtttcatgccggactgatgatgatcccgatggtgcttggcagcatgggaatgaagcgaattgtggtacaggtggtgaatcgctttggttatcgtcgggtactggtagcgaccacgctgggtctgtcgctggtcaccctgttgtttatgactaccgccctgctgggctggtactacgttttgccgttcgtcctgtttttacaagggatggtcaactcgacgcgtttctcctccatgaacaccctgacgctgaaagatctcccggacaatctggcgagcagcggcaacagcctgctgtcgatgattatgcaattgtcgatgagtatcggcgtcactatcgccgggctgttgctgggactttttggttcacagcatgtcagcgtcgacagcggcaccacacaaaccgtctttatgtacacctggcttagcatggcgttgatcatcgcccttccggcgttcatctttgccagagtgccgaacgatacgcatcaaaatgtagctatttcgcggcgaaaaaggagcgcgcaatgaagttctggcgacccggtattaccggcaaactgtttctggcgattttcgccacctgcattgtcttgctgatcagtatgcactgggcggtgcgtatcagttttgagcgtggctttattgattacatcaagcatggtaatgaacagcgattacaactgttaagtgatgcgcttggcgagcagtatgcgcagcatggcaactggcgcttcctgcgcaacaatgatcgctttgtctttcagatcctgcgttcatttgaacacgataattcggaagataaacccggcccgggtatgccaccgcacggctggcgtacccagttctgggtggttgatcaaaacaacaaagtgctggttggtccgcgagcgccgattccacctgacggtacacggcgacccattctggtcaacggtgcggaagttggcgcggtgatcgcctcccccgttgagcggttaacgcgcaatactgatatcaatttcgataaacaacagcggcaaaccagctggttgattgtcgccctggcaacgttactcgcggcacttgccacttttctgctggcgcgcggtttactggcaccggtaaaacgacttgtcgatggcacgcacaaactggcggcgggcgatttcactacccgcgtaacgcccaccagtgaagatgaactgggcaaactggcgcaagacttcaaccagcttgccagcacactggagaaaaaccagcaaatgcggcgcgattttatggccgatatttctcacgaactgcgtacgccattagcggtgctgcgcggtgaactggaagccattcaggatggcgtgcgtaaattcacgccggagacggtggcgtctttacaggcggaggtcggtacactgaccaaactggttgacgatctccatcagttgtcgatgtctgatgaaggcgctctcgcctatcaaaaagcaccggtagatttgatcccactgctggaagtggcgggcggcgcatttcgcgaacgattcgccagtcgtggcctgaaactgcaattttccctgccagacagtattaccgtatttggcgatcgcgaccgtttaatgcagttattcaataacttactggaaaacagcctgcgctacactgacagcggcggcagcctgcaaatctctgccgggcagcgcgacaaaacggtgcgcctgacctttgccgacagtgcgccaggtgtcagtgacgatcagctacaaaaattgtttgaacgtttttatcgcaccgaaggttcccgcaaccgtgccagcggcggttccgggctggggctggcgatttgcctgaacattgttgaagcacataatggtcgcattattgctgcccattcgccttttggcggggtaagcattacagtagagttaccgctggaacgggatttacagagagaagtatgaccgagttaccaatcgacgaaaacacaccgcgtattttgatcgtggaagatgaaccgaagctggggcagttgctcattgattatctgcgtgctgcgagctatgcgccgacgcttatcagccacggcgatcaggtactgccgtatgtgcgccagacaccaccggatctgatcctgttagatctgatgctccctggcaccgatggcctgacgctgtgccgggaaattcgtcgtttttctgacattccgatcgtgatggtgacggcaaaaatcgaagagatcgatcgcctgctggggctggagattggcgcagatgattatatctgtaagccgtacagcccacgggaagtggtagcgcgcgtcaaaaccattttgcgccgttgcaaaccgcagcgcgagttgcagcaacaggatgctgaaagcccgttgattatcgacgaaggtcgttttcaggcttcatggcgcggtaaaatgcttgacctgacgcctgcggaatttcgtctgctgaaaacgctctctcacgaaccaggaaaagtgttctcccgcgagcaattgctcaatcatctttatgacgactaccgcgtagtaaccgaccgcaccatcgacagccacattaaaaacctgcgccgcaagctggaatctctcgacgccgaacagtcatttatccgcgccgtttatggcgtcggttaccgctgggaagccgacgcctgccgcatcgtttagttttagcgacattattttgttagccggagatggcgttcagaccagatccggcaacattatcccacgcatggtcagcaaactgacattatctctccgccctggcaggcatcagaaaatcgctcatactttaatcggtaaacagcacctttagatgctgttttcgatacacaatttcaatcaaggagtcattatggctggttggtttgaactcagtaagagcagtgataatcagttccggtttgtgctaaaagcgggcaatggtgagactatcctcaccagcgagctttatacctcaaaaacctctgcggaaaagggcatcgcgtcggtgcgtagcaacagcccgcaagaagaacgctatgagaaaaaaacggcaagtaacggcaaattctatttcaatctgaaagccgctaatcatcaaattatcggctccagccagatgtacgccaccgcgcaatctcgtgaaaccggaattgcctccgttaaagccaatggcacaagccagacggtgaaagacaatacgtaattacgatgccgggcgtgggttgttggcgtccggcgctttaccagagccccccacagcgctacaatgcccgcccttaaagtgggggcactcccctaaccgcttcatcaggtgaagcggatctgacctgtcatcagaacgagagaattatgtttaaaccggaactcctttccccggcgggaacgctgaaaaatatgcgttacgctttcgcttatggcgcagatgctgtttatgcgggccagccgcgttattccctgcgtgtgcgcaacaacgaattcaaccacgaaaatcttcagctcggcatcaatgaagcccacgcgctggggaaaaagttttatgtcgtggtcaacattgcaccgcacaacgccaagctgaaaacctttatccgtgacctgaaaccggtggtggaaatggggccggatgcgctgattatgtccgatccagggctgattatgctggtgcgtgagcacttccctgaaatgccgatccacctttcggtgcaggctaacgccgtgaactgggcgacggtgaaattctggcagcaaatgggcctgacccgcgtgatcctctctcgcgagctgtcgctggaagagattgaagagatccgcaatcaggtgccggatatggagatcgagatcttcgttcacggcgcgctgtgcatggcctactccggtcgctgcctgctctctggctatatcaacaagcgcgacccgaaccagggcacctgcaccaacgcctgccgctgggagtacaacgtccaggaagggaaagaagatgatgttggcaacatcgtacacaagtacgagccgattccggtgcaaaatgttgagccgacgctgggtatcggcgcaccaaccgacaaagtgtttatgatcgaagaggcccagcgtccgggcgagtatatgaccgcgtttgaagatgagcacggcacttacatcatgaactcgaaagatctgcgcgccatcgcccatgtagaacgcctgaccaaaatgggcgtgcattcgctgaaaatcgaaggtcgtaccaaatctttctactattgtgcacgcaccgcacaggtttaccgcaaagctatcgatgacgccgctgcgggaaaaccgttcgataccagcctgctggaaactctggaaggtctggcgcatcgtggctataccgaaggtttcctgcgtcgtcatactcacgacgattatcagaactacgaatacggttattcagtttctgaccgccagcagtttgttggtgagtttaccggtgagcgcaagggggacctcgcggcggtagcggtgaaaaataaattctccgttggcgacagccttgagctgatgacgccgcaaggcaacattaattttacccttgagcacatggaaaacgccaaaggcgaagctatgccgatagcaccaggcgatggttatactgtgtggctcccggtcccgcaggatcttgagctcaattacgcgctgctgatgcgtaatttctccggggaaaccacgcgtaatccccacggtaagtgattaatttcgattatttttcccggatggaaaattcttagaaaccgatcacatacagctgcatttattaaggttatcatccgtttcgctgaaaaacataacccataaaatgctagctgtaccaggaaccacctccttagcctgtgtaatctcccttacacgggcttattttttacgcgtaatacaatgaaataaaaggatttatttctggtcacgtccacacattgaccacatcgacaaaaaagcccctcgactgaggggcttcctgtttctaattacatccacataatttgctgccctgacggcaacgggtgcggccttacgacgtggacttctcccggcttcacaatgtatcgctgtaccgactcataagtgatgaacgtggcgctgcaattcacgttctgacactggtgataacgctcttttgtcgtgtcagtgatatagcggcttgtacgcgcatgtgcggcatgctggcataaaggacaatgaaacatcgcgagcacctcttccggttttgttgatggtgccattttagttaatttacccttacaaaacaaacagataaaataaaaacatcactcattatcttctgtttcgtaccccacatcagaaagcctgacctcaagctctaatgacgtcgtgaagccgctattattcagaaaatgtgtcaccttagtgattgtccagtcctgctcgtctatgacgcgcttaaagccagacactttgaccggtgtttccgtgtaaatatctgcccgaccggtagccaggctgatggagaactctgctacacgggcttatttttttatgcataagccctatctctggtaaccgtcttccattgaccacatcgatagaatcctccttcatagcacgatgcctttcacttatcggcatcgtgctcccacaggttccggctacgcacagccagaacgcgcatatttgacgcttaccaaaaaatattctcactctccacatttgaatgtcagacgagcgacaccatgtaatcctacaccttctgtcttcagctcaactatttgcatttttttgccctgagtaacacagaaatgagttgcatcattttttactatattttctgcaccagatattctacccctggctaaagaagcttcggcttcggtgtagtattggttatcgagtttacgctgaatattacttttatatgcaagaccaaatttaccgatacttgtctcatcattatgcacagcacaaccagacataataaaaatactaattaatgatatagcagctatctttttcatctcaccttcccccattaaataccaacgacactctctagtgtttaaatataataatggcatgattattataattgaataggattataataaatgttctgtacaacatttcctacataagtaggaattacggacattgaggcccttcagggtaactccatgggggctttaatatattatattgaagatgccactgtttagttgaatattaggtatatgctcttttttgaaatttatcggtggcagccgttagtattcgctgtccccattgcaagctcctggtggtaaccactgaatcctccatacttgaactgactttttatcctccgactttcatcctgttctgactccaccttttgttttctgctctacactatctacagaccaatcataaaggcacatacgatcatggcagaatttcccgccagcttactgattcttaatggcaaaagtactgacaatctacccttgcgcgaagcaattatgctgttgcgtgaggaaggaatgacgatccatgtgcgggtcacctgggagaaaggcgatgccgcacgatatgtagaggaggcccggaagtttggcgtcgcaacggtgattgccggtggtggcgatggcaccattaatgaagtttctacggcgttgattcagtgtgagggggatgacatacccgcgctgggaattttgccattaggaaccgccaatgattttgccaccagtgtagggattcctgaggcactggataaggcgctgaaactggcaattgccggtgacgccattgcgatagatatggcgcaggtcaacaaacaaacctgttttattaatatggcgacaggcggatttgggacgcgtattaccacagaaacgccggaaaaattaaaagccgcgctgggtagcgtctcttacatcattcatggcttaatgcgtatggatactctgcaaccggaccgttgtgaaatccgcggtgaaaactttcactggcaaggtgacgccctggtcattggtattggtaacgggcgtcaggccggtggcggtcagcaattgtgtccgaacgcgttaattaacgatggcttgctgcaactgcgcatttttaccggcgatgaaatacttccggctctcgtatcaaccttaaaatctgacgaagataacccgaatattatcgaaggcgcttcgtcgtggtttgatattcaggcaccacacgacatcacctttaatcttgatggcgaaccgttgagtgggcaaaattttcatattgaaatacttccggcagcgttgcgttgtcgattaccaccagattgtccactgttgcgttaatcaaactattctctcttgaaccagggagaatccgtaatgccggatgcggtgtaaacaccttatccggcatacagaacaatactacaccgtaattaattttacccgcgtcttctgcaatgccagtttatccacctctgacacagcatcatcggtaataataatgtcaattttttcgattggtagtacctgattaaaaccgcgacggttaaatttcgatgaatcgagaacggcaatcactttattagcggctgtgaccatcgcaccgctaatagaataaccttcattaaaggtcgtaataccattaaccgcatcaataccatcagcaccgacaaacattaaatcggcattaatatcctgtaatgaacgctcggcaatggaaccatgcatcgagcgcgttttatggcggaccgtgccaccacagacgaccagagtaatgtctttattttcggaaagggcaaacgctgccgggagactgttggtaatcaccgtgatatttttggcggtcattaatccttcggcgataagcattgtcgtacttccgctgtcgagaataacggtctgatcttacccagcaatagtggacacgcggctaagtgagtaaactctcagtcagaggtgactcacatgacaaaaacagtatcaaccagtaaaaaaccccgtaaacagcattcgcctgaatttcgcagtgaagccctgaagcttgctgaacgcatcggtgttactgccgcagcccgtgaactcagcctgtatgaatcacaactctacaactggcgcagtaaacagcaaaatcagcagacgtcttctgaacgtgaactggagatgtctaccgagattgcacgtctcaaacgccagctggcagaacgggatgaagagctggctatcctccaaaaggccgcgacatacttcgcgaagcgcctgaaatgaagtatgtctttattgaaaaacatcaggctgagttcagcatcaaagcaatgtgccgcgtgctccgggtggcccgcagcggctggtatacgtggtgtcagcggcggacaaggataagcacgcgtcagcagttccgccaacactgcgacagcgttgtcctcgcggcttttacccggtcaaaacagcgttacggtgccccacgcctgacggatgaactgcgtgctcagggttacccctttaacgtaaaaaccgtggcggcaagcctgcgccgtcagggactgagggcaaaggcctcccggaagttcagcccggtcagctaccgcgcacacggcctgcctgtgtcagaaaatctgttggagcaggatttttacgccagtggcccgaaccagaagtgggcaggagacatcacgtacttacgtacagatgaaggctggctgtatctggcagtggtcattgacctgtggtcacgtgccgttattggctggtcaatgtcgccacgcatgacggcgcaactggcctgcgatgccctgcagatggcgctgtggcggcgtaagaggccccggaacgttatcgttcacacggaccgtggaggccagtactgttcagcagattatcaggcgcaactgaagcggcataatctgcgtggaagtatgagcgcaaaaggttgctgctacgataatgcctgcgtggaaagcttctttcattcgctgaaagtggaatgtatccatggagaacactttatcagccgggaaataatgcgggcaacggtgtttaattatatcgaatgtgattacaatcggtggcggcggcacagttggtgtggcggcctcagtccggaacaatttgaaaacaagaacctcgcttaggcctgtgtccatattacgtgggtaggatcagtcatcccttcgtggatcattttgactgccgcctgcgctattctgttttttggcgcgctggcgagctgaaatcgctctttaaacccgacttcctgggtctcggtttcactattaccagacattattttcgccgcaccgccatgaaagcgcgtaaccacgcctttttgttcgagaaagcgcaaatcggcacggattgtcgcttccgaggcagcaaatactcccgccagatcctgaacaagcacggttccctgttcattcactaattggatgatcttattccttcgctcgaatgaattcatcgtcatttacccatattcaattgtggctagtgtaaacgaagggggaccattggtgaatgatctgttttgcacaataccgggccagcatcacgctggcccgcggtttcagggaatgagcaacactttgcccggcatagcattacgagcgatgtcacgcaccgcctgggcgaagctttcaaagcttccacggtgagcgattaatggctccaggcttaacttacgttctgtcagcaaccggctcgccgtttcccactcctgccccggccaagggctggagtagttcatccaactgccgataaccgtcagctctttacgcaatattttgccaaacgttgccgatgttaaatgcagatcctgatgcaacgtgcccaccagcgccagttgggcatgaggaccggcaatctctaccgccagttcgacagtttgcggtacgccagccgtctcgaggataagctgattaaagcgcagttcgcgtaaaacgctctgcatttgcggcgcgctcatttcgctactgttaaatgtttgcatcgcaccgaaagattttgccagtgccagtttttctgaactaatgtcgatcgccgtcacactctttgctcccagcgcgacagcgcactgaatggccagcaggccaatggttccggcaccaataataataacgtttttattctcacaaccttgcgctaaatgaaaagcatgcagaccaacggtaatcggctcaataaaagccccatcctcaataggcatatccgtgggtagagcaaagacattttttcgcttaacgacaatatattcagcaaatccaccatcacgccgcgagccaataaaatcatattttgcgcactgggaataaaaccctttcagacactctggacaagtaaaacagggtaataacggcacacaggcaaccgcatcgccagggtgtaaatcatcaacaccggatcccaccgcatcaatatagccgctaaattcatggcctaacgttattggataataatgtgcaccatttttaaatatcctgggtaaatcggaaccacataagcccgagctggcaatttttacccgcacctcatcctgatgtttaatttcaggaatgacgctttctgcaacgcgcacgataccatcagtatcattcaccactgatttcataaaaactcctgattgttaagggggataacctccccctcaggtaaaaattattctgcgagaacgactttctcttgtttaataaagccacgcgctctacgccaggtcatgaaaataccggtcagataaattgcaccgataataatgaaaccgggaatattttgcggggagaaaacctgaatcagtaaccaggtaatgggagaaccgccctgatccattgaagccaccatacccccggcttttaacgccccagcattagccgccagttgggtgtgcaaaccaatagtttgcgtcgcgatccacagggtgatgctcataatgatgacacccgagattaaggtgcggaacagatttccacgatgcacggcgaccgccatcgccacgaagaagccgatggtggcaagatcgccaaacggcagcacctgattacccggcacacaaacagcaattaaaatggtgagtgggataaaaatcaggcttgccgataccaccgccgtatgtcccagcagcaacgccggatcaaggccaatcaggaactcctgaccgccgaacttcgcctgtaaacgactacgagcctgcttagcgatgggcgttaaaccatccatgatgggtttaatcacccgtggcattagcagcatcactgccgccgtttttaccgccagctgcaatacacctttgacatcgtaacccgcgaggatgccgataatcagccccatcacaaaacccacggtgacaggctcgccaaatggaccaaatttgcgctgaatatcgtcggcgctaaatttaattcggttaacgcctgggattttctcgatgatagcatcgaccagcaccgcaatcggccccatatacgccgacgtaccgtgcggaatagcaataccttccagctcaaagaaatttcgggtatcgcgggcaaaccagtcgccgagcttataaacaaacgccgcgtgaattaccacacctgccatccctatcatccatgaaccggttgccagatgcagcaacgcgccggtgaaggtcatatgccagatattccagatatcaacatttaccacccgcgtcatacgggtcagtaacatcgccacgttaaccagaatcgcaatcggaatcgccaccagcgcaatttgcgacgcccaggtcattggtgaagagcccggccagccaacatcgaccacatgcagattcaggtcgaaattttccgccatcgctttcgccgccgggccaatggaatccagcattaagccaatcacaaggccaatgccaacaaagccaatcccgatatgcagacccgctttaaagcaatcgcctgccttcatgcctaatattttagaaaaaataatgatgacaatcggcagcatcaccgtagggccgaggtcgagaatataacgcatgacttctgaaaacataggtcacccctgtaagatagtcagaattttattttgtaatgcttcgataccgataccagaaataaaaggcatgccgtgaactaacggaatatcgccaaaactacgatccactttggcagtggtgcatatcaaatgcacaccatccatataggtttctatttcattaacccgacactggattaattcaacaggaatattatgattctgacacaactctttaatttcttccgccgccatcgtagaggtcgcaaccgcgcctccgcaagcgacaataatcttgcgtttcataaatagtcctttttattgttacagagggatttattcgtctgaatctaaaacatactttgtgaagtattcctttaactgggtttcaggaagagtgattagtgtctcgacgatatcgggctgttgtaacttgccaaataaacagcgtaaaagtttcaattgctgctgcggattttccacaatcaacgcaataaccaacgataccgccacgtcgttatcatcatccgcttgctgaaaatgaactttatttgttggccttaacagataaatggctgacgacttagcatgaatcgcctcacaatgcggtattgcaatagcgtgctgctcaagcattatcccggtagggaattctgcttctctggcaattaatgcctgtggccaggtatcatgaaccacacctttggcgagcatctcattaccgatatgggttaaaacttcgctacgatcgacaaaagaaattccgctacgaacaaacaggttagtcatataccgtccttattccgcacagccgtagcgataggcgcgcaaaacatcataaattttatccataatcagctgatgcggtattgctgataattccccggactgaatgcgttcaaattgtttgggaagatactgactaatcatgcccagtgggatgtccacgccttcaagattcaccatcatcgtttcgacgctatttttaatccgactatgcggccagtaataacgaatacgatccgacaggctgtaacgaatatccagtaatgaatcgttaaaacccgtacgataatattttttccagtattgcggttcgtcgagcatcacttcttcaattaccgccaggcaaccgctgcgattttcaggggcgataagttcctgctcaatttgtgccagtgcaaatatcgcctcgcgtaaagcaaaggttaatgcgggaccgactttcaatattgcaaagtgatcgcggactaattcccaataagccgtccgggtctggtaatcggtagaatgtgcttcataaaccattcgggtgttttctatccattgcgccagcggctgcgcttcctgcggctgataatggataatattgctgtgatcaaattccacacccggctgcaccacgatggcaatcacacgtgttaacgcctctgtcagcccacgggcaataaaggccttttgatgcgtacgtaaagtattggcggcatcttcaacatgggtgatgtgtactgactgaatggcgctggcctcaccgcccggaaccggaacttcggtgccaatgacatagctcagttgctcacgctggcaatctgtcgccacactttccgcagcaaagcaaagcacagcagctcgttccgcaaccgtttctggtgctaacggtatgggatcccccgcgcaggacattgacgcatcaagatgaattttactgaagccggcacgaacatattcctttaccagctcgacggatttttccatcgccgcatccgcattttcttgctgccagcagtttggccccagatgatcgccgccgagaataatgcgttcgcgtgcaaacccaactttatcggcaatcgtaaaaacaaattcgcgaaagtctgccggtgtcattccggtataaccgccaaattgattgacctggtttgacgttgcttcaatcagcactttgcgcgtgctgttgcgatcaaatgccagcgccgcttcgataaccaacggatgggcagaacagactgaacatatgccgatatgttcaccagctttatgccgggcaattaacgttttcatgttttttccttgttaaatggcaggtgcgttatgccctgccctcgcagccacaatcggcaatcactttgctcaccacatcgcgcattgcggatttagccgactgcaaataatcccggggatcggtcgcttcagggtgctcggtcaggtaattttttaacgcctgcgagaaggcatttttcagctccgttgcaacgttgattttgcatatccccagtttgatggtttgctgaatatccttagtcgataaccctgacgcgccatgcagcaccagcggtaagttcacccactggcgaatgttctccagtctagaaaaatcaagcgccggtgcgctggcatacatcccatgagccgtgccgatggcgaccgccagggaatcaattccggttgcctcggcaaattcacgcgcctgagcggggttggtgtacaacgcatcggcttcattgacttgcacatcatcttcctggccgccaagttgccccagctccgcctcgacgctgacatcaaagcgatggcaaaaatccaccacctctttgacccgtgaaatattttgcgcaaaaggcaaatgcgaggcgtcaatcatgactgagcgcacgccagaacgaaccttctgagcgatatcgtcaaatttcgtgtgatggtcgagatgaattgccagtggatggtgatattgcttcgccatcgcgctgaccagcgccaacagattttctgtaccagcatgagtaaatgtgccaggcgttccggcgatgatgaccggcgcatgcaggttggcagcggtttctaccaccacttgcatcgtttcgagattgtgaatattgaatgccggaaccgcataaccgccgcgctgtgcgttgttcagcatctgctttgtcgataccacgtacattttcatatcctgtcgtttgttttcgatttcaaaatataatgaaattatttktttttaaatatcgagataacgatcacaaaaacgacaatatgaaaattattcgaggagtgaaaggcaaaaaaacggcctcccgatagggaagccgtagcaaagtgcgcgtgtttttatgccggatgcggtgtaaacatacgtggcagtgctatgtaggcatgataagacgcttcagcgtcgcatcaggcataggttgccggatgcagcgtaaacgccttatccgtcctacggggtggtgttgttcgtataaggcgtatcaggcgatagtaattttgctatcgagataaacgtcctgcacggcgttaatcagtttcacgccgtcagccatcgatttcttgaacgctttacgtccaagaatcagccccattccgcctgcgcgtttgttgataaccgcagtacgcactgcatcgctgaggtcagtttcaccgcccgcagcaccgccggagtttatcaacccagcccgacccatatagcagttagctaactgataacgcaccagatcaatcgggttttcgctggtcaatttgctgtaaacacgatcgtcggtgtaaccgtaattaattgctttatagccgccgttattttccgccattttttgtttgacgatatctgcaccgatggttgccgccagatggtttgcctgaccggtcaggtcggcggaaacatggtaatcaacgccatctttcttaaaggcggagttacgcaaataggcccacagcactgtcaccatacccagctcgtgcgcacgttcaaaagccgcagaaatttcttcaatctggcgacgtgactcttccgagccaaaatagatagtcgcaccaaccgcaaccgcgcccatgttgaacgcctgctccacgctggcatacagcgtttgatcgtaggtattcgggtaacttagcgtctcgttgtgattaagtttgacgaggaatggaatgcgatgcgcataacgccgcgataccgacgccagcacgccgtaagttgacgccacacagttacagcccgcttcgatcgccagttcaacaatgtttttcgggtcaaagtagagcgggttagcagcaaatgaagctccggcagagtgctcaacgccctggtcaaccggcagaatagaaagatatcctgtgccagccagacgcccggtgttgtacaacgtctgcatattacgtaacaccgctggcgggcgattattgtcaatcattacgcggtctacgtagtcatgtccggggagataaagctggtcagaaggaattgtcatacaacggtgctgtaaaaggttgtcggcgtctttgccaagcaactgcgcaatatctgtcattactatgctcccgtaaattccgattggatatcggctatggattgtcctggcccgccttttgcgggcaatcataatcctggtcgttacgggcgagtttttccatcttttggatgttttttcagcgttttctgttggctcgattcatcagaaaaaatgttagcgcggtcaagttttcaccgcaaaggtatttaaaaggtattattaagtggtattgtcatcgcgtaccttacattacctgtcatgaaggaattaaaagatgaaaacaacagcaaagctgtcgttcatgatgtttgttgaatggtttatctggggcgcgtggtttgtgccattgtggttgtggttaagtaaaagcggttttagtgccggagaaattggctggtcgtatgcctgtaccgccattgcggcgatcctgtcgccaattctggttggctccatcactgaccgctttttctcggcgcaaaaagtgctggcggtattgatgttcgcaggcgcgctgctgatgtatttcgctgcgcaacagaccacttttgccgggttcttcccgttactgctggcctactcgctaacctatatgccgaccattgcgctgactaacagcatcgcttttgccaacgtgccggatgttgagcgtgatttcccgcgcattcgtgtgatgggcactatcggctggattgcctccggtctggcatgtggtttcttgccgcaaatactggggtatgccgatatctcaccgactaacatcccgctgctgattaccgccggaagttctgctctgctcggtgtgtttgcgtttttcctgcccgacacgccaccaaaaagcaccggcaaaatggatattaaagtcatgctcggcctggatgcgctgatcctgctgcgcgataaaaacttcctcgtctttttcttctgttcattcctgtttgcgatgccactagcgttctattacatctttgccaacggttatctgaccgaagttggcatgaaaaacgccaccggctggatgacgctcggccagttctctgaaatcttctttatgctggcattgccgtttttcactaaacgctttggtatcaaaaaggtattattgcttggtctggtcaccgctgcgatccgctatggcttctttatttacggtagtgcggatgaatatttcacctacgcgttactgttcctcggtattttgcttcacggcgtaagttacgatttttactacgttaccgcttacatctatgtcgataaaaaagcccccgtgcatatgcgtaccgctgcgcaggggctgatcacgctctgctgccagggcttcggcagtttgctcggctatcgtcttggcggtgtgatgatggaaaagatgttcgcttatcaggaaccggtaaacggactgactttcaactggtccgggatgtggactttcggcgcggtgatgattgccattatcgccgtgctgttcatgatttttttccgcgaatccgacaacgaaattacggctatcaaggtcgatgatcgcgatattgcgttgacacaaggggaagttaaatgaaaacagaacgtattctcggtgctctttatgggcaggcgttaggggatgcgatggggatgccctccgagctttggccacgcagccgcgttaaagcacactttggctggattgaccgttttcttcctggaccaaaggagaataacgcggcctgttattttaaccgcgccgaattcaccgacgatacctcgatggcgctgtgtctggcggatgcgttactggaacgtgaaggcaagatcgatccggatctgattgggcgtaatattctcgactgggcgctgcgtttcgacgcctttaacaaaaacgtactaggtccgacctcgaagattgcgcttaacgccattcgcgacggtaaacccgttgctgaactggaaaacaacggcgtgaccaacggcgcagcgatgcgcgtctcgccattaggttgtttgcttccggcgcgtgatgttgattcctttattgatgatgtagcgctggcgtccagcccgacccataaatccgatctggcggttgcaggcgcggtagtcatcgcatgggcgatttctcgtgccattgacggagaaagctggtcagcgattgttgattccctgccttcaattgcgcgacatgcacagcaaaaacgcatcactacgttcagcgcctcactggcggcgcggctggagattgcgctgaaaattgtgcgcaatgccgacggcaccgaatccgccagcgaacagctttaccaggtcgttggcgcaggtaccagcactattgagtccgttccgtgcgccattgcgctggttgaactggcacaaaccgacccgaatcgctgcgccgtcctgtgcgctaaccttggcggcgacacagacaccatcggtgctatggcgacggcaatttgcggcgcgttgcatggcgttaacgctatcgatcctgcgttaaaggcggaactggatgcggtaaatcagcttgatttcaaccgctatgccacagcgctggcgaaatatcgtcaacaacgggaggcggtatgagcggcgctcgattacacacgctgctgcctgaattaaccacgcgtcagtcggtgatggtcgtcggcgcggcggtcattgacgtgatcgccgacgcttatgccctcccctggcgtgggtgcgatatcgaactgaaacagcagagcgttaacgttggcggctgcgcactgaatattgccgtggcgttaaagcgcctcggcatcgaagcgggtaatgccttgccgctcggtcagggcgtgtgggcggagatgattcgcaaccggatggcaaaagagggcttaatcagcctgatcgataacgccgaaggtgataacggctggtgtctggcgctggttgagccggatggcgaacgcacttttatgtcattcagcggtgttgaaaatcagtggaatcgccagtggctggcgcgattaaccgttgcgcctggcagcctgctctatttttccggttatcaactggcctcgccctgcggcgaattgttagtggaatggctggaagagctgcaagacgtgacgccgtttatcgattttggcccacgtattggcgatatcccggatgcattactggcgcggatcatggcctgtcgacctttagtgtcgctcaatcgtcaagaggctgagattgccgccgaacgttttgctttatccgcagagataacaacacttggcaagcaatggcaggagaaatttgccgcgccgttgatcgttcgtctcgataaagaaggcgcatggtatttcagcaacgacgcttctggctgcattccggcatttccaacgcaagttgtcgacaccattggggcgggcgacagtcatgccggtggcgtacttgccgggctggcctctggtctgccactggcggatgccgtattactgggcaatgcagtggcgtcgtgggttgtcgggcatcggggcggtgattgtgcgccaacgcgcgaggaactactcctcgcacacaaaaacgtatagatcgctgcgacagtggctaatgctgtactcaataggccgttgctgttggtcaagcgccacttgcttgatcaccagcaccggtattttgctatctaactgaatatgtgactgaaactcggcatccggcatccgggcgctaacgcgggaacgcgtacgttgtgggtaaatgtgctggctgcggaaatagtcataaagtgaaatcccgatggcatcaacatcatgaattaaatgcgccggaacccacgattcctcaatcgataccgcttcttcatcgacatagcgaatacgcttaagcaaaaagacatcacttcctgcttcgaccgccagctgctgcgcgacttcttcgggacatttcacgacacgcttgttaacccatagcgtatcgggctttttcccgcgcaataccacctgctgagaaaaacctcgcgcttctttcaacgagtattcgaagatgttgttgatctgcgtgccgtaaccgcgcgaacgcgtcaccacaccctcttcttccagcgcctgcatcgccttgcgcaccgtaatgcgcgaaacgccggttaactgacttaaatcacgctcaccgggcaaaatattgccatgctccagcaccccgctgcgcacggcattttttaccgtttcggcaaacttaatataaagcggcgtgttatccgccgctaaaatacgctcgttcagttgggcaatcagctgggtatgcgcttgttccatttgtctttttcctgccggggagtctggtgggagtatatcactgcttcttatttaaggcgtttctttaatcccatcaacgaatgcctgcaactcctccaccgtgccattaaatacattaaaatccaccggaccattgatgccatctacctgtccacggtcggaatgctgccagaagcgccaggccattccgtcattgtccggacgacgttgatagtagtgagccacccaccacggatattcattgaaatagcccgccagattggtgtgataaaaaacggctcctgagtaaataatcggctttttccccgtacttttttcgaccatttttagccactgacttacccgcttgcgtaattcttttgccgataattttccccgttcttctacgtccagcacggcagggaaatcgccttgtgagaaatccaccgtttgcagaaataatctcgcctgaactgaagcggataccgacggggagaaataatgatacgccccacgcagcaggccattttcgcggcttagttgccagttacgcgaaaaataggggtccaccagcttttcgccttccgtcgccttaataaaagcaaactgtaagcggataccattgtcgcgcatttttgccacccgctgccagtcgatccgctcctgccagcgcgaaacatctattccgtgaatggtgtaactggcaggaatgcgaatagcgaaagatttaaccgggcgataaccgtagaagtggatgtagtctgtaatctgaactgctgtcgaatagaaaaaattcaccgtctgacgcggataaattgcaacgatggaaattagcccaagagcgcataatagagaggtgagtttttttcgactggtaattcttagctgcattggtttcatccctgaatgtcagtgccaaaggctgacaataaccaaagcagctatagtacggtgctcaccaccaggcgtggaagtggtgaaccggaccaataccgtgaccaacttccagcgtgtcggcctgggctaacgccgatgaaagccagctttttgcctcctgtacggtgtcagcccagtttgtatggcgcgggcgtagtgcagccaacgccgcagagagtgtacaaccagtgccgtgggtgtttttggtcataatgcgcggtgcggtaaaccgttgttcaccctcgcgggtaaacagccagtccgggctttgctcatcatccagatgaccacctttcattagcactgcgccacagcccatcgccaacagcgatcgcccttgttccagcatttcctgttcggtgcgcgcgtgtggcgcgtcgagcaaggcggcagcttcgggcaagtttggcgttattaatgaaacctgtggcaataatcgactgcgcagcgtagcaaccgccgaaggtgaaagcagcgggtcgccgctttttgccagcataacggtgtcgagtaccacgttttggatctgataacgttgcaaccgttctgccaccgcttcaacaatatcggtttccgccagcataccgattttagtggtatcgattcgcacatcgctgaacaccgaatcgagctgggcggcgacaaaatcaggctcaatgcgatacaccgactgtacgccacgggtattttgcgccaccagtgcagtaataactgagcaaccataagcgccaagtgccgagaaggttttaagatcggcctgaatccccgcaccaccactcggatcagtaccggcaatcgtcagagcgttaattcgtttcatgcctgcacctcctgcgtcaattgccagagcgcatcaaggaaatgtggaacaaaactgcctggcccctcgcttctggcgactgcgcgttctccggcttgtttcatccagtgacaggcagatgcgacattttccagcgtatcgcctggtaacgcacagcaggcagcgacaaccgccgataatgcacagccagttcctaccactttggtcattaacggatcaccaccgtgaataccaatgatacgatgtccatcggtaacataatccatctcgccagtgaccacgacgattgcgccagtttcccgtgccagtgtttgtgcagcgggtatcgcgttagctgcggcgtcagtggtatccactccccgtccgccattagcaatgccagctaatgccatgatttccgaagcattaccacgtatcgctgccggtttaaaagataaaagttcatgacaaaaatggcggcgataatcgagcgcacccaccgctactggatcaagcgtccagggtgtttgagagctttttgcttgctcaacggcagcacgcatcgcctgagcgcgtggctgcgtcagtgtgccaacgttaatcaacaaggcactggcgatagccgcaaactgactggcctcttcggtttcgataaccatcgctggcgatgcaccgagcgccagcaaggtattggcggtaaaggtttgcaccacatcattggtcatgcagtgcacaagaggggaatgttggtgaaaaaggtgtaacgcgtgcgcagattgcgctgaacccagcaggtcgacttgcatagtttgctcctgccataacgtgaagaagcaatgacctggtggtccgtgacttccctacgctggcattatccagatcaggtgatacgggtatttctcagccttcacgcagaagggcaccccgagtcgtttggttgcgatgataaatcgcagaggaggatggtaatgtccagcgcacgcgttgtaaacgaggaaaaacggcagttttacaatcgcgttaataaattatttgatatatgaatccagcaccttcagaacgacatccagatcttcttcacgttttagctcatccccctggtgaacgatgtgttccgtcagatgacctttaatcacttcccgcatcagaccgtttaccgcgccacggatagcagcaatctgttgtaaaactgcagcgcattcgtgcggctcgtcgagcattttcttgagcgccacgacctggccctgaatcttactggcacgcgctttcagtttctgtttatcacggattgtatgagacatggcaacacctggttaacaagaatatgaaaaatcatagcactattaatctactggggggtagtatcaggtactgggggggagtagaatcagattgccgaattaatactaagaattattatcatgaccgaatttacaactcttcttcagcaaggaaacgcctggttcttcatccccagcgccatcttacttggtgcgcttcatggcctggaaccagggcactcaaaaacgatgatggcggcgtttatcatcgccatcaaaggcaccattaaacaagcggtgatgctcggactggcagcaactatttcgcataccgcagtggtctggttaattgcctttggcgggatggtgatcagcaagcgctttactgctcaatcagcagaaccgtggctccagctgatttccgcagtgatcattattagcaccgcgttctggatgttctggcgtacctggcgcggcgaacgcaactggctggagaatatgcacgggcatgattatgagcatcatcatcacgatcacgaacatcaccacgaccatggacatcatcaccatcacgaacatggcgagtatcaggatgcccatgcacgagcccatgccaatgacattaaacgacgctttgatggtagagaggtcaccaactggcaaattttgttatttggcttaaccggtggccttatcccctgcccggcagcaattaccgtgctgttgatatgcattcagttgaaagccctgacactgggcgcaacactggtcgtcagtttcagcattggcctggcgttaacgcttgtcaccgtaggcgttggcgcagcaatcagcgttcagcaggtcgcaaaacgctggagcggatttaacactctcgctaaacgcgccccctatttttccagtctgttgattggcttagtcggtgtgtatatgggcgtacatggcttcatgggcataatgcgataactcaatcctttaggcttgcatgttatcttcagcccaggatgattcttaaatcagctatttccgctgactctctgctcgctaaggatgcttttagggcatcctttcatttacactttttacgaaatcatgggatcactaacaaaatatcgcttgtcagttatattgtatggcaggaaagatatgcgactgatattacagatccccaaagtggagagtttatgaccattaaaaataagatgttgctgggtgcgcttttgctggttaccagtgccgcctgggccgcaccagccaccgcgggttcgaccaatacctcgggaatttctaagtatgagttaagtagtttcattgctgactttaagcatttcaaaccaggggacaccgtaccagaaatgtaccgtaccgatgagtacaacattaagcagtggcagttgcgtaacctgcccgcgcctgatgccgggacgcactggacctatatgggtggcgcgtacgtgttgatcagcgacaccgacggtaaaatcattaaagcctacgacggtgagattttttatcatcgctaaaaaaagccccctcatcatgagggggaaatgcagacaccttgttattttttattattagccacttgctcgtcttgcttgttattagtcgtatttcacgttgattaatgcggttgcctccagtgcgccagatttaactttgtttgtatcgtagacgtagtaactggctgttatcggaattgaaaccgttgtatctgtaagttttgacttcgccgcaacttcctttaaatttgtatatcctttactgctgttagtgatatttaaaagtgtgactggcgaaccattactttcaagaataaatcctacgccattatcttccgcacctttcagtattgtgttgctgttggttaacaagtcagaacttgataaatacacctgcattttccgtgatgtttgattttgttgacctaataaatttttacaacgcagaataatatccccttgtttactatttattgttgctttgttacctgtggctggtaattgtgaaacgggaatactgtctaaagtaattaataaatcgtccggtttgcaggttgtggttatcgggttgtatgacaatgtcagattaaaggaatagacacctgcattttgtgccaatgcatttctgtagctatttacacatgcatcccatgacttgccacctaataaacacagtagaaattgtactgcggcactcccgcgtgtcgatgatgaagcactggataatgtcgcaacaccattaatcatcactgaaccgccgccccccgcagaaacattcacttttgcattactggccgcaggtgtcaccgtaactgaataaccactggtgaaactggtctgattatttgacaacgtgatgttgtttttattggtccattcaaaatgtaaatttaattttatggtatcgttataaagtccaacaataatatccgacgggctcataggggtgatagtatttgtacttacgcatgacgaatcattaaaattatgctcatatgtcgccatttgtgtttgagtaagtgcaaaatccccctgaacaaccaagttgtgctgaacagataactcactataacatgccgcatagctcacaggcataaccatcatcattaatataaatagcattatgcgaatttccatagaaccacctgactattactggcaaatataatttctactttcatcaatctctttaccgaaggtgattgtgcatgaaagtccttgttgcttatcaattgccacattaaccgatggcggtacttcattggtgcgaataaataactgacttccctggccgacaacgccaatattatgaccatggatatcattgacttcataaccaaacgttaatgattgcccatctgctcttaacgcttttataaaccatggcttgcgctgatcggtatcaaaattaaccagtacaaccgcgccgcgataaggggcggcaattttccggttgccacgtaattctgcttcgctatcgctttgcgacacatccagcatcaggtgattttcccgataaggtgtcattccgtcgtatatcaccactccattacggtttgttgtgcgatatttttgcccattgacataagcatctttaattcctggcgcattcatcacagcaaacgtttcggaaagacggttcgccagattaacgccacccgaccaggcgacaatgccccctgaaacactggctccagcctgtcgataagtactcgactgactataactgccattcactgtcgcaaccggcgcgttccaggtcaaattcgccccagctgtcgtttcatttccctgatgttgatgactcaggttgacaccataattgaactgatcccgactccctactgttcctgataatcccgtattatttgaggcaaacccctgatcatcaaacgtcgttgagttagacatatatatttgccgacgaggcgtcgaaacgtcatcaccccaatcaaagggaatcgatataaaaatattaaaacgtttctcttcatgatgattctcgtcataagcctggcttgccgcgagggtatagcttatccgtcgcaggttgttggaataactcaactgataatccttactactgccgctacgcccccagtaatctcgccataacgtacttaatgacacagacccccaaccttctggcaatgactggctcatattggcggaaaagctatttttgcggccaaaatcgttctggtaataatcggcaatgtcatagacatcgttttcatcacggcgataattatctttattgtttgcccaaacgtgatcgttaaatgtccggtaatcacgcgacgaataacgccaggccgccagaccaaaacgcgtcgacgtttggctcacaaatttgttgtaggcaatttgataactttgcccgtcaaacacatcgccgttgtcttgtttactatgcgacttagtggcatcgacggaaatggcaccaatgcgtgtattccagccagcccccaaagtaaacgcgtaataattattcgcgaccatcgagccaccatacagcgtcaataaattattaaaaccatactgataacccgcctggacaaaatcactttgtttgctcgccccttcaatatggctacgacccgccgctaaatcatatttcgacacgccgggttgcagcatatttggcaccgctgcataaggcaccagataggtggttaccgagccgtccgcctctttcacgctgacatcaagatctgctccaccaccggccaactgcaaatctgtaatcgcgaacgggccaggaggaacctctttctgataaaccacaaaaccattctgttcaatagttaccagcgcgttactctgagcaatcccctgcacccgtggcgtaaaattttgtttcgagttaggcaacatctgcatatcacgaaacaaccgcacacctctgaagcgaacagaatcaaaaatatcgcttgatgtgtacatatcacccacgcgaagcgtgccgagaagttgggcaaatccacgttccagatacagggtattgcttttccacacccctggattgttatttgttttactgaaactggcatcagaatgcagttgccaccccagtaaatttaacccgctgttaaaacgtacatatgtactcttgttattacccgacgctttatagtcgctgtaatactgactcagataataagaggtataaaacgcattaataccccgctcccagttttccggtggaacatagccactttccagttcttccacccaggcctgcgggacactgaaatcgagacgaaaaaccccgatatcccaggtatagctcccaccctgaacaagttgctcaaatgttaaacattgcttaccgctggcgaagttatcgctattaatgcctaaccgcttgataacttctcttgataaacatgtttcttgcgggttgtctttaacaataatctcatatttcccgcgccattgcttattgacataaatatcgatgtcatactgccccggtaagggttgattatcatcaagacgaatatttgcaacctgctggtctttcattccacctatcataaaatgggtatcaaaggtttcttcagctgcataagcttcaatgccgagcaataacgctacgattgctgatgcaagtggggtcattctcaacataggcagctcctgcaattaaattttgtcactaatatagttgccatggtcatcgataatggtcagatgccagttatttgcattattacttttgacattaacactctgactttctaagggggcaatcataatagtttcataattgactttgacattattagctttgacatccgaaatcgtcacccaattagctgagtcattttttatcaccaaaccattgccactgcgatttaccagcaattttttaaatgtcgctttatttaccggagcaatacccgctggccggtaaaacaacttaattctgttttgcatcgcaaacttcagtgcattcttaccttcttgctctggactatttggtggaatatccagaacattcagataaaaaatgctttctttattagtgggcagtttattcggcataattttgatttttacttgctgcccggaatttgcccctatttttgccactggtggcgttaacatgaaaggaacctgaattttttctggtggtaatgacgtatcgccatcatcaatccacgcctgcagcagcgaagaacggtttccctggttcatcaactgcaccatcacttctttattttctgccgggtaaataatgcgcgtcccgtagataacaattccggcatgtgcaggaaggaccatagaaaaaatgagtaaagataataatcctttcattttaatgcctcttaaattaaaaggccgccatgggatagcggccatgtttattacctggagaaacttacaattttatttattaatcctgcgccacacgcataaccagagaagataacacatcacctgattgcactgagttatctgtcagtttcaggtattttgctttaaacggaatagcatattgaccttccgctgttttataactctcaatgttaaaaggtgcagaaacatccaggacatcgctgttatcacctaaatagagatagtaacccacggtatcgttgctactggctatcgccttatcgttaccggttattttatcgttggtaatcaacgagagttttacaccagcaacttctttcgggcagctaatttttaacatgctgctggttacaccgactgcatcatcataggtagaatatttagctttaccttcaaagacactggttggtacagtcggcatattaatacttactgaatcaccacccgcttcgaatttacacggagattctgcaatattccccttaatagttaatgttccggtatcaacgtctgcagcaaatactccagcgctcataaaaaaagaagaaaagacagcggcagcaataattgaacgtttcataatatgttccttaataaaatttatttttggttgttaagagtctgtatctcttggaaacaaatttctcacatcaaaaaagttgccgcaatgtaaacacattgttttattgatttaaaacaaattaaccattgcaatataaatacaaaaaatatttaagagtattaactatttatcgcatctatcaattaatgtagatttatgtaaatggtattgttgatatcaataaaaaagccgaaatcatttatataaatgatttcggctttctaaatgcaattaaaatcaggttgccaaattaatcgtagcgatttaacacgattcgacgtttgctatcgctacctgcaacaaccacttctgtcgttacacctttgacgggcgaagaaaacagatgacgggtgtcaacattatacgttaactgaccacaatgctgttgaggttgaccattaaccatagccatactgcatgttgggggactgatcctgccattaatcgctaatgtggcagtctctgaagagaatgcgggagaagccaatccataggcaagaaaaataattcctgacagccaatacttattcattgaacgttatccctgtagtaaaggttatgcctggatagaatgagtgcataacaaactatagctgtacatccactacacagccacgaaggatgataatgaagcattgcctgtatgatcaatcgactttgtagagtttcggacgaaggtccgcagaatattcgcagtattaaataagtgttcattaatgcggcaaaaactaatacaccgcatcaatgtaacatctctgcggtgtatgaagaataaccagaatggttaataggcgttagaccgcgcggaaggaaatctcgcctggaatgacttcaccctgccagtagagctgagctgcaacgcggtcagccagctggcggtagatagcggtaaattcgctctccggacggctgataaccgttggcgtacctttatcgagatcctcacgtaaggagatgtgtaacggcatctgccccagcagctgtgtatggtatttttcagccagtttctctgcaccaccggtaccgaaaatcggttcatggtgaccacagttactgcaaatatgcacactcatgttctcgacaataccgagcaccggaacctcgactttctcgaacatcacaatgccttttttcgcatcgatcagcgcgatgtcctgcggggtggtgaccacgactgcaccggttactggaatgttttgcgccagcgtcaattgaatgtcaccggtgcctggcggcatatcaagcaccagatagtcgagatccggccacaaggtttcctgcaacatctgcattaacgccttgctcgccatcggtccacgccacaccatcgcattgtcgtcagtgaccagataaccaattgaattggttgccaggccatgagacataatcggtgccatatgggtaccgtccggcgaagttggacgctgattttctgcgcccaacattgttgggattgatgggccgtagatatcggcgtccagaatgccgactttcgccccttctgccgccagcgccagtgccaggtttaccgccgtggacgatttacccacgccgcctttaccggaactcaccgcgataatgttcttcacaccgttaattcccggctgattcttcacgcgtttcagagtggctatgttatgcgacagtttccagtcgatagctttcgccccggtgatgcgcagcagttcggcgctacattgctcttttaactcttcgaacgcgctatgccagacaaacggcataaccagttccacatgcaacgtgtcgtccatccaggcgacatggtgcaacgctttcagcgtggtgaggttatgcttcagggttgggtgctgaaaattggccagtgtcccggcgaccattgcgcgcaaggcttctggtgatttggcctgggattgttcgttcatcccgactccttttttgtatagataaaccatcagctgatagtttacctgaagaatatagagaagtacttacttaacattttcccatttggtactatctaaccccttttcactattaagaagtaatgcctactatgactcaagtcgcgaagaaaattctggtgacgtgcgcactgccgtacgctaacggctcaatccacctcggccatatgctggagcacatccaggctgatgtctgggtccgttaccagcgaatgcgcggccacgaggtcaacttcatctgcgccgacgatgcccacggtacaccgatcatgctgaaagctcagcagcttggtatcaccccggagcagatgattggcgaaatgagtcaggagcatcagactgatttcgcaggctttaacatcagctatgacaactatcactcgacgcacagcgaagagaaccgccagttgtcagaacttatctactctcgcctgaaagaaaacggttttattaaaaaccgcaccatctctcagctgtacgatccggaaaaaggcatgttcctgccggaccgttttgtgaaaggcacctgcccgaaatgtaaatccccggatcaatacggcgataactgcgaagtctgcggcgcgacctacagcccgactgaactgatcgagccgaaatcggtggtttctggcgctacgccggtaatgcgtgattctgaacacttcttctttgatctgccctctttcagcgaaatgttgcaggcatggacccgcagcggtgcgttgcaggagcaggtggcaaataaaatgcaggagtggtttgaatctggcctgcaacagtgggatatctcccgcgacgccccttacttcggttttgaaattccgaacgcgccgggcaaatatttctacgtctggctggacgcaccgattggctacatgggttctttcaagaatctgtgcgacaagcgcggcgacagcgtaagcttcgatgaatactggaagaaagactccaccgccgagctgtaccacttcatcggtaaagatattgtttacttccacagcctgttctggcctgccatgctggaaggcagcaacttccgcaagccgtccaacctgtttgttcatggctatgtgacggtgaacggcgcaaagatgtccaagtctcgcggcacctttattaaagccagcacctggctgaatcattttgacgcagacagcctgcgttactactacactgcgaaactctcttcgcgcattgatgatatcgatctcaacctggaagatttcgttcagcgtgtgaatgccgatatcgttaacaaagtggttaacctggcctcccgtaatgcgggctttatcaacaagcgttttgacggcgtgctggcaagcgaactggctgacccgcagttgtacaaaaccttcactgatgccgctgaagtgattggtgaagcgtgggaaagccgtgaatttggtaaagccgtgcgcgaaatcatggcgctggctgatctggctaaccgctatgtcgatgaacaggctccgtgggtggtggcgaaacaggaaggccgcgatgccgacctgcaggcaatttgctcaatgggcatcaacctgttccgcgtgctgatgacttacctgaagccggtactgccgaaactgaccgagcgtgcagaagcattcctcaatacggaactgacctgggatggtatccagcaaccgctgctgggccacaaagtgaatccgttcaaggcgctgtataaccgcatcgatatgaggcaggttgaagcactggtggaagcctctaaagaagaagtaaaagccgctgccgcgccggtaactggcccgctggcagatgatccgattcaggaaaccatcacctttgacgacttcgctaaagttgacctgcgcgtggcgctgattgaaaacgcagagtttgttgaaggttctgacaaactgctgcgcctgacgctggatctcggcggtgaaaaacgcaatgtcttctccggtattcgttctgcttacccggatccgcaggcactgattggtcgtcacaccattatggtggctaacctggcaccacgtaaaatgcgcttcggtatctctgaaggcatggtgatggctgccggtcctggcgggaaagatattttcctgctaagcccggatgccggtgctaaaccgggtcatcaggtgaaataatcccccttcaaggcgctgcatcgacagcgccttttctttataaattcctaaagttgttttcttgcgattttgtctctctctaacccgcataaatactggtagcatctgcattcaactggataaaattacagggatgcagaatgagacactttatctatcaggacgaaaaatcacataaattcagggcagttgagcaacagggaaacgagttgcatatcagttggggaaaagttggcaccaaagggcaaagccagataaaaagtttttcagatgctgcggcagcggcaaaagcggagcttaagctgattgcggagaaggtgaagaaggggtatgtggagcaagcgaaggataattctttgcaaccttcccaaacggtaacgggctctctcaaggtagcggacttatccaccattattcaggaacaaccctctttcgtagcagaaacccgtgcgcctgacaaaaatacagatgctgttttaccgtggctggcgaaagatattgctgtcgtttttccgcccgaagttgtacacaccacgttaagtcatcgccgctttcccggagttcctgttcagcaagcagacaaattgccccaattacgtcgcttagcctgtagtgtgtcgcaacgggataataaaacagccacatttgacttcagcgcctgttctttagaatggcaaaacaccgtcgcccaggcgatcagtcagatcgacggcctgaaaacaacacagttaccatcaccagtaatggctgtactcacggcacttgaaatgaaatgcacaagatataaagtgcgtgaggatgttatggatcagatcgtccaggaaggcggtctggaatatgctactgatgtaataatacaccttcaacagattgatattgaatgggattatgcgaataatgtcattattattctgccgtctggcattgcacctagctacttggagcaatattccagatttgaatgacgcctacgtaaacatttatcactgacggaagagtctctctggcaaaaatgtgcacaaaaacttattgccgcaattccacatattccagaatggcggcaaccattaattgctttgttattacccgaaaaaccagaaattgcacatgaaattgcccagcgtctactggggcaaaaaaaattaccctcgcttgagtggttaaaaatagtggcgactgatgagcacattcttgcctcattagaaaaatatcacgaaccatatgccatttttgatgattactattgtggtgcgatatggtcagccaccgtattacaggagcaaggtgttgcagccctgccccgatttgctccctatgccgcaagtgactactgcgccgatgtgttgcgtcatatcaatcatccgttcgcattgacactgcttatacgtgtagccgggcaaactaaacgctgtcacgatcggatgacgaaagccattgctgcgttcccacatgcagcaatggcggcactgacggaacttcttgggcaaaaagaagagaacagttggcgcattatgctaatgacaatgcttatctcacaaccagcactggcagaacaggtcattccctggctctcgacacccgcagttgccgtactgaaatcatgccagcaacaactgacacagccctcaaaccatgccagcgccgatctactgccagccgtagtagtctcccctccctggctttcgaaaaagaaaaaatcgccgattccggtgctggatttagcgccattaggcattgagccaatctgttatctgacagaagaaatcagtaatcaacttttggcgaaatatatctggtattcaaaacacatcacggttagccatgaagaaagtactaccaacctgttggcaaggatgggttttcaacgacggatcgctggtacatatattaaagctcccgaagcggtagttgaggcatggctaaatgaagattattcaaccttactaagtgaatttaaggtgtttcattcacctaccgggcattattggcagttggggattttgacaacattgccgctggagaaagcagtaaaagcatggaatgcccttaccctatctccacataccgataccgaatactccatgttacattttggactcaaagggttacctgggttagtaaactcacttgcacgctatccacaagaagccttgcccatcacgaattacttcgcagcgagtgagctggctcctgccgtcgcccgtgccttcaacaaactgaaaacgctacgcgaaaacgcccgtagctggctgttgaaatacccggaacatgcccttaccggcctgctgcctgcggcgctcggcaaagccggtgaagcacaggataacgcccgcgctgccttgcgtatgcttaccgaaaacggtcatcagccattactgcaagaaatcgcccgacgttataaccagccggaagtaaccgatgcggtgaacgctctgcttgcgctcgatcccttagataatcacccgacaaaaatccccactcttccggccttttatcagccatcgctctggacgcgcccggtattaaaagcaaatgcccaatcactgccagatagcgccctcctccacctcggtgaaatgctccgcttccctcaggaagaggctctgtatccgggattattgcaggtgaaagacgtctgttccgccgactcactggcgggatttgcctgggatctgtttaccgcctggcagaccgctggcgcgccgtcgaaagagagttgggcgttcactgcgttaggcgttctcggtaacgatgacaccgcccgcaaactgacgccattaatacgcgcctggcctggtgaatcccagcataaacgcgccaccgttgggttggatattctcgctgctatcggtagtgatatcgcccttatgcagcttaacggcatcgcccagaaactgaaattcaaagcattacaggagcgggcaaaagaaaaaattgccgacattgccgagagccgcgaactcacggtggcggagcttgaagatcgggttagcaccggatctcggtctggatgataacggttcgctgctgctggattttggcccacggcagttcaccgtcagctttgatgaaaccttaaaaccgtttgtgcgtgatgtttccggcagccgcctgaaagacctgcccaaaccgaacaaaagcgatgatgaaacgcgggcgaacgatgcggttaaccgctacaaattgctgaaaaaagatgcgcgtaccatcgccgcccagcaggtagcaaggctggaatccgccatgtgcctgcgccgccgctggtcgctggaaaacttccagctcttcctggttgagcatccgctggttcgtcacttaacccgccgtctgatttggggcgtttatagcgccgaaaaccagctactggcttgctttcgcgtagcagaagataacagctccagcaccgctgacgatgatcttttcaccctgccggaaggcgatatctctatcggcactcctcacgttctggaaatatcaccaacggatgctgccgcctttggtcagctttttgccgactacgaactgctaccaccgttccgccagctcgaccgtaacagctacgccctgacagaagccgagcgcaatgccagtgaactgacccgctgggcaggcagaaaatgcccgagtggtcgggtcatggggctggcgaataaaggctggataaagggcgaaccacaggatggaggctggatcggatggatgatcaaacctttgggtcgctggtcgttaatcatggaaatcgatgaaggctttgcggtaggcatgtcgccagccgaactcagcgctgagcagctcttaagcaagctgtggctatgggaaggcaaagcagaaagatatggctgggggagtaattcaacacaggaagcgcagttctccgtaatcgatgccatcaccgccagcgagctaattaacgatattgaagccctgtttgaataaggaaagagcatggacaaggaattaccgtggctggcggataacgcccaactggaactgaaatataaaaaaggcaaaacgccgctcagtcatcgtcgctggccgggcgaaccagtgtccgttatcactggaagtctcatccagacattgggtgatgaattgctacaaaaagctgagaagaaaaaaaacattgtctggcgttatgagaatttttcactggagtggcagtccgccatcacgcaggccatcaacttgatcggcgaacacaaaccctcaatcccggcccggacaatggcggcgctagcctgtatcgcgcaaaatgacagccaacagttgctcgacgaaatcgtccaacaagaggggctggaatatgcgactgaggtggtgattgcacgccagtttattgcgcggtgttatgagagtgatcctctggtagtgacattgcagtatcaggacgaggattatggctatggttatcgctcagaaacctataacgaattcgatctccgactgcgtaagcatctctctctggcagaggaaagctgctggcagcgttgcgccgacaaactcattgccgcactaccaggaataaacaaagttcgccgcccttttattgcgctgatcctcccggaaaaaccagaaatagccaatgagttggtaggccttgaatgcccgcgaactcattttcattctaaggagtggttaaaagttgttgctaatgaccccacagcggtgagaaaactcgaacactactggagccaggatatatttagcgatcgagaagccagctacatgtcgcatgaaaaccacttcggctacgcggcctgcgccgcccttttgcgcgaacaaggactggcagccattccgcgcctcgcgatgtatgcccataaagaagattgcggcagtctgctggtacaaattaaccatccgcaagtcatccgcaccttgctactggtggctgataaaaacaaacccagcctgcaacgtgtagctaaataccataaaaacttcccccatgcgacgctcgccgcactggcagaactgctggcgttaacagaaccaccagcccgccctggttatccaatcatcgaagacaaaaagctgcctgcacagcaaaaagcacgcgatgaatactggcgtacgctgttacaaacgctgatggcatcgcagccacaactggcagcagaagtgatgccgtggttaagtactcaaccccagtcagtgctgaagagttatttatcggcaccgcccaaaccggttattgatggcaccgataacagcaatctgccagaaatcctcgtttcaccaccgtggcgtagtaagaaaaaaatgacagctccacgtcttgatttggcaccgctcgaattaactccgcaagtttactggcaaccaggcgaacaagagaggcttgccgccactgagcctgcccgttatttcagcacggaatctcttgcgcaacgcatggaacaaaaaagtggacgagttgtattacaggaactgggttttggggatgatgtatggctgtttctgaattatatactccccggaaaactggatgctgcacgcaattcactctttgttcagtggcattactaccaggggcgggttgaagagatcctgaatggctggaactccccggaagcacaattagcagaacaggcgctccgcagcggtcacatagaagcgttaattaacatatgggaaaatgacaactactcacattatcgtccggaaaagagtgtctggaacctgtatttattggcacagttgccgcgtgagatggctttgaccttctggctgcgtatcaatgagaaaaagcatctgttcgcgggtgaggactattttctcagtatcctcggattggatgcgctaccaggtctgctgttggctttttcacatcgtccaaaagaaacatttccgttaattttaaattttggcgcaacagaactggcgctgcctgttgcccacgtctggcgacgtttcgcggcgcagcgtgatctggctcgccagtggattttacaatggccggaacatacggctagtgcacttatccctcttgtctttaccaaacccagcgataatagcgaagccgcattacttgccctgcgtttactgtacgaacagggacatggcgaattgctacaaaccgtggcaaaccgctggcagcgtacagatgtatggtctgccctggagcagttgcttaaacagggtccaatggacatttacccggcacgcattccaaaagcccctgatttctggcatccgcaaatgtggtccaggccgcgccttatcactaataatcaaactgttaccaatgacgctctggaaattatcggcgaaatgctgcgctttacccaggggggacgtttttatagcgggctggaacaactgaaaacgttctgccagccacaaacgctggcagcttttgcctgggatctcttcactgcgtggcaacaagctggtgcccccgcaaaagacaactgggcatttctggcgttaagtctctttggtgacgaaagcacggcacgggatctgacgacacagatcctcgcctggccacaagaaggcaaatctgcccgtgctgtcagcggcctgaacatccttaccctgatgaataatgatatggcgctgatacagctgcatcatatatcgcaacgggctaaatcccgccccttacgtgataacgcggcggaatttcttcaggtggtcgcagaaaatcgcgggctaagccaggaagagctagcggacagattagtcccaaccctgggccttgatgatccgcaggcgttgagttttgattttggtccccggcagtttaccgttcgcttcgatgaaaatctcaacccggttatctttgatcagcaaaacgttcgccagaaaagcgttccccgtttgcgcgccgatgacgatcaactgaaagcgcccgaggcactggcccgactaaaagggctaaaaaaagatgctactcaggtgagcaaaaacctgctcccgcgtcttgaaacggccctacgtaccacccgacgctggtcgctggcagattttcattctctgtttgttaatcatccctttacccgtctggttacccagcgattaatatggggggtttatccggcaaatgaaccgcgttgtttactcaaagcctttcgtgtggccgcagagggggagttctgcaatgcgcaagatgagccaattgacctgcctgcggacgctctgattggcattgcccacccgttagaaatgacagcagaaatgcgcagtgaatttgcacagctttttgccgattacgaaattatgccgccttttcgccagttgtcgcgccgcacggtgctgctcacacctgacgagtcaaccagtaacagcctgactcgctgggaaggtaaatccgctaccgttgggcaacttatgggaatgcgatacaaaggctgggagtcaggctatgaggacgcatttgtctataacctgggtgagtaccggctggtccttaagttttcacccggttttaaccactacaatgttgatagcaaagcgctaatgagcttccgttctcttcgagtgtaccgtgacaataaatccgtcacttttgccgaacttgatgtgtttgatttgagtgaggcgttaagcgcacctgacgtcattttccattaaaacacagcgggcagtgatgcaactgcccgttatcaacacgacttaccagcggggaaagcgatgatcgtgcaaaaagagctggttgctatttacgattatgaggtccctgtacctgaagatccgttttccttcagacttgagatccataaatgctctgaattatttacaggttccgtctatcgactggagcgattccggctacgtccaacatttcatcaacgtgatcgagaagatgctgacccgctaataaatgatgcgttgatttatataagagatgagtgtattgatgagcggaaattacgaggtgaatcacctgaaactgtaatagcaatttttaatcgtgaactacagaatatattcaaccaagaaatagaataatatactctaaataattcaaattggtccgatccggcgcaacgtcccaatggcctggattataaatctcattatcttaattgcaacggggtccagccgtggttataattcgttcgttggaacacgatgttgcacaggctgtggtgttaggcctgaaaatagtaaataaaagaacctgcctcaccagcaggtttttttatttactgtgatctgctttccagatatttttcgctcaaacaactaatgcgccaaacatttattgcgcgtaaaatatcgtttatttcattaatacatttcagggatgaatatatgtcaccgcagaataatcatctgcagcgtccgcctgctgctgtgttatacgccgatgaactggcaaaattaaaacaaaatgataacgcaccttgcccgcccggttggcagttaagtttgcctgcggcccgtgcttttatccttggcgacgaagcgcaaaatatcagccgtaaagtggtgattagcccctccgctgtcgaacgtatgttagtcactcttgctaccggccgcggtttgatgttggtgggggaaccgggtaccgcaaaatctcttctttctgaattactggcaaccgctattagcggcgatgccgggttaaccatccagggcggggcatctaccaccgaagatcaaatcaagtatggctggaactacgccctgcttatcaatcatggtccgtcaacggaagcgctggtccctgccccgctttatcagggaatgcgcgacggcaaaatcgtccgtttcgaagagataacgcgtacaccgctggaagtgcaggactgtctgttaggtatgctttctgacagggtgatgacggggccggaactcactggtgaagccagtcagctctatgcgcgagaaggctttaatattattgccactgccaatacccgcgatcgcggcgtcaatgaaatgagtgctgcgctaaagcgtcgcttcgattttgaaacggtttttccgattatggatttcgcccaggagttggaactggtcgccagtgcttcggcgcgtttgctggcccatagcggtattccgcataaagtgcctgacgcggtactggaattactggtccgcaccttccgcgatctgcgtgccaacggcgaaaagaaaacgtcaatggatacactgacagcgattatgtccaccgctgaagccgtgaacgtggcccatgctgtgggcgtccgcgcctggtttttagcgaatcgcgcgggggagcctgccgacctggtggaatgtattgccggaaccatcgtcaaagataacgaagaagatcgcgcgcgtctgcgccgttacttcgaacagcgtgtcgccacacataaagaagctcactggcaggcttattatcaagcccgccaccgcctgccgtgaggaaagatgcatgagcgagccgttaattgtcggcatccggcatcatagtccggcctgcgcccggctggtgaaatcgttaatcgaaagccagcggccacgatacgtgttgattgaaggcccggctgattttaatgaccgggtagacgaactgtttttagcccaccagcttccggtagctatttacagttattgccagtatcaggacggtgcagcccccgggcgtggtgcctggacgccatttgctgaattttcgccggagtggcaggcgctacaagccgcacgtcgcattcaggcacaaacttacttcatcgatttgccttgctgggcgcagagtgaagaagaggacgattcgcctgatacgcaagatgaaagccaggccttactgctgcgtgccacccgcatggataacagcgataccctgtgggatcacttgttcgaagatgaaagccagcaaactgcattaccctctgcgctggcgcactattttgcccaactgcggggcgacgcctccggcgatgcgctcaatcgtcagcgcgaagcctttatggcccgctggattggatgggcgatgcagcaaaataatggcgacgtgttagttgtctgcggtggctggcacgctccggcactggcaaagatgtggcgcgaatgccctcagaaaattaacaagccagaattgccctcgctggcagatgccgttacaggttgttatctcacaccctacagtgaaaagcgccttgatgtgctggcaggatacctttcaggaatgcctgccccggtatggcaaaactggtgctggcagtggggcttgcagaaggccggtgaacaactgctaaaaactatccttacccgtttgcgccagcacaaattgcccgcttctaccgcggatatggctgccgctcatctgcatgcgatggcgctggcacagttgcgcggtcatacactaccgttacgcactgactggctggatgccatagcaggctcgctgattaaagaagccctgaacgcgccgttgccgtggagctatcgcggcgttattcatcccgataccgatccgattctgctaacgttgatagacacattagcgggtgacggattcggtaaacttgccccttctacgccacaaccgcctctgccaaaagatgtcacctgcgaactggaacgtaccgcaatctcccttccggcggagcttaccttaaatcgctttacccccgatgggctggcgcaaagtcaggtgttacatcggctggcaatactggagatccctgggattgtacgccagcagggaagtacactgacacttgcaggcaacggtgaagaacgctggaaattaacccgcccgcttagccagcatgcggcattgattgaggccgcctgttttggtgccacactccaggaagccgcacgcaataaattagaagccgatatgctggacgcgggcggaatcggcagtatcaccacatgtcttagccaggcggcgttagcgggtctggcgtccttcagtcaacaattactggagcaactcacactattaatcgcccaggaaaatcaatttgccgaaatgggccaggcgctggaagtgctttatgccttatggcggctggatgaaattagcggtatgcaaggcgcgcagatattacaaacgacgttatgcgcgactatcgatcgcacgctgtggctgtgtgaatctaacggcagaccggatgaaaaggagtttcacgctcacctgcatagctggcaagcgctttgccatattctgcgcgatctacatagcggcgttaatttacccggcgtttctctttctgcggcggtagccttactggagcgacgcagtcaggcaattcatgccccggcgctggatcgcggcgcggctcttggcgcactaatgcgtctggaacatcccaacgccagtgccgaagcggcgctgacgatgctggcgcagttatccccggcacaatctggtgaggcgctgcacggtttgctggcgctggcccgccatcaactggcctgtcagccggcatttatcgccggtttcagcagtcatttaaatcaactgagtgaagccgattttattaacgccctgcccgatttacgcgcggcgatggcctggctaccaccacgagaacgcgggacgctggcgcatcaggtgcttgagcattatcaactggcgcaacttcccgtttcggcgctgcaaatgccgttgcattgtccaccacaggccattgcacatcatcaacaactcgaacagcaggcactggcatcgctgcaaaactggggagttttccatgtctgaactgaacgatcttctgaccacccgtgagctacaacgctggcgattaattcttggcgaagcggcagaaacgacgctttgtgggctggatgacaacgcccggcagatagaccacgcgctggagtggctgtatgggcgcgatcctgaacggctccagcgtggtgaacgttccggtggattaggtggctcaaatctcaccacccctgagtggatcaacagtattcacacgctgtttccgcagcaggtgattgagcggctggaaagcgatgccgtgctgcgctacggcattgaagatgtggtgacgaatctcgacgtgctggaacgtatgcagccttctgaaagcctgctacgcgctgttttgcacaccaaacatctgatgaaccccgaagtactggctgccgcccgccggatagtgtgccaggttgttgaagaaattatggctcgactggcaaaggaagttcgtcaggctttttctggtgtccgcgatcgccgtcgccgttcatttattccactggcgcgaaactttgatttcaaaagtactctgcgcgccaacctgcaacactggcacccgcaacacggcaagttgtatatcgaatccccccgctttaacagccgcattaaacgccaaagcgaacaatggcaactggtcttactggttgatcaaagcggatcgatggtcgattcggtgatccactctgcggtgatggcggcctgtttgtggcagttacccggcattcgtacccatctggtggcgtttgacacaagcgtcgttgatctcacggcagacgttgccgatccggtagagttattaatgaaagtacagttgggcggcgggaccaatatcgccagtgccgtggagtatggtcggcaacttattgaacaaccagcgaaaagcgtcattatcctcgtgagcgatttttacgaagggggttcatcatcattactgacgcatcaggtgaaaaagtgtgtccagagcggcatcaaagtgctgggactggcagcgctcgatagcaccgcaacaccttgctatgaccgcgatacggcccaggcgctggttaatgtcggcgcacaaatagccgccatgacgccgggcgagctggcatcatggcttgcggagaatcttcagtcatgaattcactacgtccggaattattagaactgacaccgcaggccctgacggcgttaagcaatgccggttttgttaagcgcagtcttaaggaactggaaaatggcaacgtcccggagatcagccatgagaacgacgctttaatcgccaccttcagtgacggtgtccgtacccagctggcgaacggccaggcactgaaagaggctcagtgcagttgcggggccaacggtatgtgccgtcatcgcgtgatgctggtgttaagttatcaacgactttgtgccaccactcagtctacggaaaaagaagaagagtgggatccggcaatctggctggaagaactggctacccttcccgatgctacccgcaaacgcgcacaggcgctggtcgctaaaggcatcaccattgagttgttctgtgcgccgggtgaaattccctctgcccgcttaccgatgagcgatgtgcgtttttattcccgcagcagtattcgtttcgcccgttgtgattgtattgaaggcacactttgcgaacatgtcgtactggcggtacaggccttcgtcgaggccaaagcgcagcaagcagaatttaaccatttaatctggcagatgcgcagcgaacacgtcacatcatctgacgatccgtttgccagcgaagaaggcaacgcgtgtcgtcaatatgttcagcaattaagccagacattatggcttggcggcatcagccagccgctcatccattacgaggcagcattcaaccgcgcattgcaggcggcagagacctgcaactggcgctgggtgagtgaatcgctacggcaactgcgcgccagcgttgatgccttccacgcccgcgccagccactataatgccggagaatgcttacatcagcttgcggcattaaacagtcgattaaattgcgcacaagagatggcccggcgcgacagtattggtgaagttcctcctgtgccgtggcgcacggtcgttggctctggcattgccggagaagcaaagcttgatcatctgcggctggtgtctttaggtatgcgttgctggcaggatattgagcattatggtttacgcatctggtttaccgatcccgacaccggcagtattttgcacctttcgcgcagttggccgcgaagtgaacaggaaaactcaccggcagctacgcgtcggctgtttagttttcaggctggcgcactggcgggcgggcaaattgtttcacaagcagcaaaacgcagtgccgatggcgagctgctgttagctacccgcaaccgcttaagcagcgttgtgccgctgtcgcctgatgcctggcaaatgttgagcgcgccgttacgccagccgggcattgtggctttgcgggaatatttacgccagcgtccccccgcctgcatacggcctcttaatcaggtcgataacttatttattctgccggtcgctgagtgtatttcgctcggttgggacagcagccgccagacgctggatgcgcaggtcattagcggcgaaggggaagataatgtgctgacgttatcattaccagcctcagccagcgcaccttatgccgttgaacgcatggcggcgcttttgcaacaaacagacgaccccgtgtgtctggtttctggctttgtcagttttgttgaagggcaattgacactggaaccacgggtgatgatgacaaaaacccgtgcctgggcgctggacgcagaaactacgcctgtggcaccgctaccttctgccagcgttttgcctgtgccgtctactgctcatcagttgctgatacgctgccaggcgttacttattcaactgctccataacggctggcgctatcaggaacagagtgctattggtcaggcatagttgctggcgaatgacctcaccgcggtgggtttttatcggctggcacatgtgttgggacaatttcgtaatacagaaagcgaggcacgggtagaagcaatgaataacggtgttttgctttgcgaacaattattccccatgcttcagcaacaaggatgaaatagtgctttttactaagagttctactccagttccggactgctcacgccacggtattaggcatatcctatatagcccctggtgagagtcaccagttccttgattaaataaaatggagttttacatgaaggctttcaataagctgttttccctcgttgttgcatctgttctggttttctctcttgctggctgcggtgacaaagaagaatcgaagaaattcagcgccaatctgaacggcactgaaattgccattacctatgtctacaaaggtgacaaggtgcttaagcaatcttctgaaaccaaaattcaatttgcctccattggtgcaaccaccaaagaagatgctgccaagacacttgagccgttaagcgccaaatacaaaaacatcgcgggtgttgaagaaaaattaacctataccgatacctacgcgcaggaaaacgtgactatcgatatggaaaaagtggattttaaagccctgcagggtatttcaggaatcaacgtttctgctgaagatgccaaaaaaggtatcactatggcgcaaatggaactggtgatgaaagccgctggttttaaagaagtgaaataatcggttggcggtcatgctctaaacatgaccgccaattttttagccttttttcacatgctggcgcgctgccagtccacgcagaaaataacgtaaaaattgatcgccgcattcgcggaagtttttatgatccggtgcgcgcatcatcgctgtaatttccggcatcgaaacgcggaactgctgttcggtgaggatagccagaatgtcatcggttttcagcgaaaacgcgatgcgtaattttttcagcacgatgttgttattaatgcgacgttccggctccagtgccggagcagactcatccttgccgcgtttttcataaatcaggccattgaggaatgacgacaaaacaatgtccggacaacgctgaaaaccctcttcgtcttctttacgtagccagacggcgatctgttccgcggtggcttcgacattacccagcgccagaatacgcaccaggtcattattattggctttcaaaatgtagcgcacgctgcgcagaatatcgttacttagcatgaggccttcaggtgttgatgaggcaaaaagccattttagcagtcttttacaggccaatcgcctcttttaagcttttcagataacggcggctgaccggcacggttaagccattacgcaaaatcaactcggcctggccgttatcttccagacgaatctcctgtaaatgcgcgaggttaaccagatactgacgatggcagcgcagtagtggtgtacgactttccagggtacgtaatgtcaattcggtaaagccctctttcccttcgtggctggtaacgtagacaccgctcatccgactgctgacaaatgccacatctttcatttgcagcaaataaatccgactatgccccgtacaagggataaatttcagcgcctgttgattttccggtaacagcgaaacatcctgcttgctgcgctcctgacgcaatcgcgccagcgttttctccagtcgcgcttcatcaattggcttcagcagataatcaaaggcatgttcttcaaaggctttaattgcgtattcgtcaaacgcagtgagaaaaacaatatacgggcgatgttccgggtcaagcatccccaccatttccagaccactgatgcgcggcatctggatatcgagaaacagcacatccgggcgcagtttatgcaccgcgccgatcccttccacggcgtttgaacactctccaacgatttcaatatcgctctgctcctgcaaaaatacacgcaggttctcccgtgctaacggttcatcatcgacaattaagactttaatcatgcctcgtccctccatggtagtcgtaacgttattcgggtgtaactatcaggctcacaggcgacgcttattccatagtcatcgccaaaccgttcacgtaaacgcttatccaccagattcatccccagcccactggcattggttaccggttgatacaaaccggcattgtcttcgatctccagcatcaaatgttgcccctcacgtcgggcgctgattgccactcgccctgtatccagcagttgtgatgtcccatgtttaatggcgttttccactatcggttgcagggtaaacgcgggcaattgctgctgggataattcttgcggaatagcaatgttgacctgcaaccgcgactggaagcgcgccttttcaatttgcagataagcattcacatgttcaatttcgtcggcgagagtaacaaactccgaaggccgctttaagtttttgcggaaaaaagtggaaagatactgcaccagctggctggcctgttcgctgtcgcggcggatcaccgctttaatggtgttaagcgcattaaacaaaaaatggggattcacctgggcgtgaagcagtttgatctctgactgggtgagcatcgctttttgccgctcatattgcccggcaaggatctgcgccgaaagcaattgcgcaatcccctcacccaacgtgcggttgattgaactgaataaacggtttttggcttcatacaatttgatggtgcccatcacccgctgattttcaccacgcaacggaattaccagcgtcgaccccagtttgcattgcggatgcaaagagcaacggtaaggtacttcgttgccatcagcgtagaccacttcaccggtttcaatcgcttttaaagtataagttgaagaaatcggtttgccgggtaaatggtggtcgtcaccaattccggtaaaggccagcaatttctctcgatcggtaatcgcgactgcaccaatatccagttcctgatacagcacctgagccactttcatgctgttcacttcgttaaacccctggcgcaaaatgccttccgtcgaggctgccactttcagcgcagtggcagaaaaagccgaagtgtatttttcaaacatcgcgcgtttatcgagcaatatacgcataaacagcgccgcgccgacggtattggtgaccatcattggcgcagcaatattactcaccagacgcaccgcatcttcataaggtcgggcgatcgcaaggatgatcagcatttgcaccatttcagcgacgaacgtgacggcaccggcggtaatggggttaaagactttatcagtgcgcccgcggcggatcaggatgctgtgtaccaggccaccgagtaatccttcaacgatggtcgagatcatgcaacttaacgcggtcatgccccccatcgaatatcgatgtaagccgccggtcagcccaaccagcccaccgacgaccggaccgccgagtaagccgcccattaccgcgcctatcgcacgggtattggcaatagaatcgtcaatgtgcaacccaaaccaggtgcccatgatgcagaagatggaaaagacgatgtagcagagaaatttatgcggcagacgaaccgtgacctgcattaacggtatgaataatggcgttttactcattaaccatgcaatgactaaaaaaacgcacatctgctgaagcagcagcaacaccagattaaaatcgtacatacccgcaaaccacacttccctttaaaacgcgtaacatacattgcctgcgtttaactttctttgaactcttgcagaaaaatgagaattcgtgagtacgatcactcaaaatcgcctggcaaaaataaaatcaccctatagatgcacaaaaaacgggcaaaactacctggttcgcaaaactgcgtctaaagttaaaccgggacctcgcgagcaagggtgagacgatggcgctttacacaattggtgaagtggcgttgctttgtgatattaatcctgtcacgttacgcgcgtggcagaggcgttacggattgctgaaaccgcaacggacagacggcggtcatcggctgttcaacgatgccgatattgaccggatccgcgagatcaaacgctggatcgacaacggcgtgcaggtcagcaaagttaaaatgctgctcagtaatgaaaatgttgatgtgcagaacggctggcgcgatcagcaagaaacattactgacttacctgcaaagcggcaatctacatagcctgcgaacgtggatcaaagagcgcggtcaggattaccccgcccagacactcaccacacatctgtttattcctctgcgccgacggcttcagtgccaacaaccgactctccaggcgctgctggcgatcctcgacggcgtactgatcaactacatcgccatttgtctggcttcggcacgtaaaaaacagggtaaagatgcgctggtggttggctggaatattcaggataccacccgtctgtggctggagggctggattgccagtcaacaaggatggcgcattgatgtcctcgcccactcgctcaatcaactacgccctgaactattcgaaggccgtacattgctggtgtggtgcggtgaaaatcgaacctccgcccaacagcagcaactcaccagttggcaagaacaaggccatgatattttcccactcggcatttaatgattcgttaacaaatgcgctttactgtacaatcctttcgttaacataaggagtgcattatgcgcatagctaaaattggggtcatcgccctgttcctgtttatggcgttaggcggaattggtggcgtcatgctcgcaggttatacctttattttgcgtgctggctaagcgcctgcaccagcctttcaaacaggcggtctgcgatgatcgccgccagtgccaccagtaacgccccctggatcacatacgcggtattaaatccgctaagcccgatgatgatgggcgtacccagcgtgctggcccctaccgttgaggcgatcgtcgccgtaccaatgttgataatcaccgaagttcgcacgcccgccagaatcaccggagccgccagcggtagctcgaccttacgcactcgctgaccacgactcattcccatacctttcgcaacttctgtcacgctggcatcaatcgctcccagcccggcaagtgtcgcctgcaggacgggcagcacaccgtaaaggatcaaggcgataatcgctggttgcagaccaaagccgatcaccggaacggcgatcgccagcactgcgacgggcggaaaagtctgtccaacggcggcaatagtttccaccagtgggcgaaattccgcgccccacgggcgagtgacagcaattccggcaccagtgccaatgatcaccgcaaacaaactcgaaattcccaccagccagaaatgagccagtgccagagctgcaaaactttcttgctgataaacgggtcgtggcagttgtgggaacaaggcagcaaacagcggctggctgtaaggcagccagaaaatcagcgccacaaacagagcaatgagccagaacagcggatcgcgcaacatcttcatacgcttacgcctccaccagcagatcctgaaaatgcagcgtgccgcaaggctggccctgcatgttcaccaccggcagcacctcgcatccccgcgcaacaaacagagagagcgcatcgcgtagcgtcatctcttctgccagtgcctcaccatctgctcgttcttcgcgacgcacgtaatccgccacactacgtaacgaaagcaggcgcacacccagttcactacgtccaaaaaactggcggacaaaatcattcgccggacgagtcagcatcgtcagcggattgccctgctgcactacttcaccgtgatccatcaataccagatgttctgccagccgtagcgcctcatcaatatcatgagtgaccagcacaatggtacgccccagcaaacggtgaatgcgcgtcatctcttgttgcaacgcgccgcgcgttaccgggtccagtgcgccaaaaggttcatccattagtaagacttgcggatcggcagccagtgcacgcgccactcccacacgttgctgctgaccaccggaaagctgatgcggataacgctcacgcaaatttgactccagccccagtagcgccattaattcgtcgatacgatcgtcaatccgcgcccgcgaccatttttgtaattgcggcacggtagcgatgttttgcgccacgctccagtgggggaacaggccaatagattgaatggcatagcccatccggcggcgcaactccagtactggcagcgagcgaatttcttctccggcaaagcggatctctccgctgtcatgctccaccaggcggttaatcattttcagggtggtggatttgccggagccagatgtgccaatcagcaccgaaaaactcccttcctgaaaattgagattgagatcgttaacggctttttgtgcgccgaacagtttgctgacatggctaaattcaatcattacgtttcaccttcagcagtgcgataagcaaatcgaacagcgcgtcggtaagcaccgccagaacaattaccgggatcacccccagcaacactaaatcaatggcgctgcttagcagcccctggaaaaccagcgcaccaaaaccgcctgcgccgattaacgccgcaatcaccgccatacctacagtttgcaccatcaccacccgcaggctgcgcagaaataccggtaacgccagcggtaactgaacatgcaggaaacgctgcgccccgctcatccccatcgctctggcgctttccagcacatcgcgcgggatctggttcaaaccgactaccacgccgcgcaccagcggcagcaaggcatagagcaccagcgcaatcagtgcgggtgtcattccggttcctgctatgccgagcgtccccagccacggaaaggccgtaaccagcgcggcaagcggcgcaatcaacaggccaaagagcgccaccgaaggcacggtctgaatcacattgagcagagaaaaaattgccccctgccgagcagtggaaaagtagcaccagatgcccaacggcacaccaatcactaacgcaggcagcaccgcaccaaacagcaacgtcagatgttgtgccagcgcgtcgtcaaacacatcctgacggttggcgtattctttcattagtgagagatcgttaagcgtgccggagtacagcaaccacagcggaataatggcaatctgcatatgcaacaaccagcgccacagcggatgcgtggagattcggcggatggcatcgctacaggccagcaatgccagcgccgcagccagccagaaaccactgccgaggctggtacgcgccagcgcactgccattttgcgccagttgggtcgccgcctttccagctccccacaccagcaatacgaagacgaattgcgccagaatgagtgcacaaatgctgccttttttaccgggaataaaacaggccgtcagccaggcgcaaccaacgcccaccagcatccagatcgtttgcggccacagctgccagagatgacgcccctcacccgaaactaaacgattaggcgcgtaactgataaacggcagcgccgctgcgattgccgtcagcaacagcagcagcgccagaacaggattaatacggaaataagtcacgggaaattacttcgtccaccctttttgtttcaggtagtcggcagccacttttttggcatccagtccttccacagcaatgctggcattcagttgctgcaatgtttttgcatcgaggctggcgaagactggctgtagccactgtgccatttgcggatactccctcaacaccgactcacgcaccactggtgcaggcgcgtagataggttgcacaccttgcggatcgcttaaggtttgcagccccagcgccgctaccgggccgtcagtgccgtaagccattgcagcattaacgccagaggtttgctgggcagcggctttgatcgtcaccgccgtgtcgccaccagccagtgacagcaactgatcctgaccgagcttaaagccataggctttttcaaacgcgggtaacgcatcggcgcgttcgataaactctgccgaggctgccagtttgaaggtgccgccctcttgcagataacgactcaggtcggcaagcgaagtgagtttatttttctctgccacatcctgacgcacggcgatagtccaggtgttatttgcaggcgcgggcgtcagccagattaacttgttgtgctccgaatcgagctttttgactttctcgtaaccttgctgcgcgtttttccacgctgcatcgttttcatctttaaagaagaaagcgccattgccggtatattccggatagatatccagttcaccggaagtaatcgccccgcgcaccacaggagtcgttccgagttgcactttattcaccgtcggtacgccgtggctttccagcacctgcaaaatgatattgccgagtagcgcaccttcggtatcgatttttgaaccgactttaacgggggaagccgcctgtagcggcaggctcacggctgccaacataaccagtgaacctgcccagagctttaagagtggcatgatgctttcctcattcttttactgttgttttcagcgaattaagagaaaagcatagttgataatggcggggttagcttgagcggaaggattcagttgcagaatcagataaatacttaagaggcatattcggtccggcgtttcctgccggatgcggcgcgagcgccttatccggcctacaaagggcgcaaacgtcgcgcccttactaaagcattacagcaactcaaactcgcctttcttaacgcgtgcggaatcagtgccgataaagacattgaacttgccaggctcggcgtcatatttcatctgttgattccagaacttcagcgcctcaatatcgatcgggaagctgacagtctgagtttcgcccggtttcagggtgattttctcaaagcctttcagctgtttcacagggcgactcatggaagccgtcacatcctgcaagtacatctgcactaccgtggcaccctcgcgcttaccggtgttcgtcacctgcacgctggcagtcactttgccgtcacgcttcatggtcggcgcagaaagtttcacatcagagacggtgaaagtggtgtagctcagcccatagccgaacggatacaacgccccgttagcttcatcaaaataacgcgaagtgtatttgttcggcttgtcggcattatacgggcgaccggtattcagatggctgtagtacaccgggatctgcccgacagaacgcgggaaggacattggcagcttgccggacgggttgtaatcgccaaacaatacatcggcaattgcattaccgccttcagtccccgcaaaccaggtttccagaatcgcatcagcctgctgatcttctttcaccagcgccagcggacgcccgttcatcagcaccagcaccagcggtttaccggtggctttcagcgccgcaatcaagtcacgttggctttgcggaatagtgatatcggtccggctggaggcttcgtgcgccatcccctgtgcttcaccgactacagccaccaccacatcagattgtttcgccgtctgcaccgcttcatcaatcatctcttgcggcgaacgcggatcgactttgaccgcttcttcatactgattcaggaaatcgataatgcctttgtcactggtaacgttcgcccctttggcatacagcactttaccgttttcaccgacggcatttttaatcccggtcagtacggtcacggattgatcggcaacaccggctgcggaccagctgcccatcacgtcacgtttactgtccgccagtggcccaaccaccgcaatggtggccgattttttcagcggtaacgtttcgagacggtttttcagcaacaccaagctttcgcgcgccacttcacgcgcttctttacggtgcaggcggctttcggcattggtatccaccgggtcagactctttcggccccaaatggctgtatgggtcgttaaacaaccccatatcatatttaacgttcagtacatggcgggcagcatcgtccagctctgccatcgtcactttgccggatttaatcaacccaggcagatacttcgagtagtactcgtcgctcatgctcatgttgattccggatttcagcgccacgcgcaccgcatcttccgggtctgccgccgtgccatgtttaatcagctctttgattgcaccgtgatcggaaacggtgatgcctttaaagccccactggtcgcgcagaacatctttcagcagccaggaatcggaggtggctggcgtgccgttcagcgagttcagcgccaccatcaccgcgccgctgcctgcgtccagccccgctttgtacggcggcatataatcattaaacaggcgctgcggactcatatcgacggtgttgtactctttaccgccttctaccgcgccgtatgcggcaaagtgtttgacgctggtcatcaccgagtagcgatctgccgggcttttaccctgcatcgcttccaccatggttttacccattgttgaggtgagatacgtatcttcgccaaaaccttcggaagcacgtccccagcgcggatcgcgcgagacatcgaccatcggtgcccaggtcatattcaggccatcatctgccgcttcataagcagagacacgtccgaccgttttcactgcatcgaggttaaaagacgaggccagaccgaggctaatcgggaacaccgtgcgctgaccgtgcagcacgtcgtaagcaaagaaaagaggaattttcaggcggcttaattccatcacctgatcctgcatggcgcggatatcctgacgggttacggtgttgaaaatcgccccaacctgaccgtctttgatcatctcgcggatcgcctctttcgggttatccgggccgacgctgattaagcgcagctgaccaattttctcatcaactgtcattttcttaagcagttcggtgacgaacgcatcccgcgcttcgggcgttaatggatggttgccgaataaatcatccgccagtgctggctgcagggccagactcaccgcgattcctactgaacatagccatttcatatggatttttcttcctttgttgcccgacgtggcagcgaaaatggtgcaaaaaccgtagtttgccataagcatgatggagagagaaaaagaatgctcagtttattgtctgaattttcaaaatattcactcgctgaattgttatacaaggcgctattctagtttgtgatattttttcgccaccacaaggagtggaaaatgtcttccatgacaacaactgataataaagcctttttgaatgaacttgctcgtctggtgggttcttcacacctgctcaccgatcccgcaaaaacggcccgctatcgcaagggcttccgttctggtcagggcgacgcgctggctgtcgttttccctggctcactactagaattgtggcgggtgctgaaagcctgcgtcaccgccgacaaaattattctgatgcaggccgccaatacaggcctgaccgaaggatcgacgccaaacggtaacgattatgatcgcgatgtcgttatcatcagcaccctgcgtctcgacaagctgcacgttcttggcaagggcgaacaggtgctggcctatccgggcaccacgctctattcgctggaaaaagccctcaaaccgctgggacgcgaaccgcactcagtgattggatcatcgtgtataggcgcatcggtcatcggcggtatttgtaacaactccggcggctcgctggtgcaacgtggcccggcgtataccgaaatgtcgttattcgcgcgtataaatgaagacggcaaactgacgctggtgaaccatctggggattgatctgggcgaaacgccggagcagatccttagcaagctggatgatgatcgcatcaaagatgacgatgtgcgtcacgatggtcgtcacgcccacgattatgactatgtccaccgcgttcgtgatattgaagccgacacgcccgcacgttataacgccgatcctgatcggttatttgaatcttctggttgcgccgggaagctggcggtctttgcagtacgtcttgataccttcgaagcggaaaaaaatcagcaggtgttttatatcggcaccaaccagccggaagtgctgaccgaaatccgccgtcatattctggctaacttcgaaaatctgccggttgccggggaatatatgcaccgggatatctacgatattgcggaaaaatacggcaaagacaccttcctgatgattgataagttaggcaccgacaagatgccgttcttctttaatctcaagggacgcaccgatgcgatgctggagaaagtgaaattcttccgtccgcattttactgaccgtgcgatgcaaaaattcggtcacctgttccccagccatttaccgccgcgcatgaaaaactggcgcgataaatacgagcatcatctgctgttaaaaatggcgggcgatggcgtgggcgaagccaaatcgtggctggtggattatttcaaacaggccgaaggcgatttctttgtctgtacgccggaggaaggcagcaaagcgtttttacaccgtttcgccgctgcgggcgcagcaattcgttatcaggcggtgcattccgatgaagtcgaagacattctggcgttggatatcgctctgcggcgtaacgacaccgagtggtatgagcatttaccgccggagatcgacagccagctggtgcacaagctctattacggccattttatgtgctatgtcttccatcaggattacatagtgaaaaaaggcgtggatgtgcatgcgttaaaagaacagatgctggaactgctacagcagcgcggcgcgcagtaccctgccgagcataacgtcggtcatttgtataaagcaccggagacgttgcagaagttctatcgcgagaacgatccgaccaacagcatgaatccggggatcggtaaaaccagtaaacggaaaaactggcaggaagtggagtaaaaattacggatggcagagtatcgccatccgaattcacttaatcgttctgtgccgtctgccccgccgccgccatttgggcggctttttgttttttatagctcaacgctgctgccggcacaggcatcactttaccggtttcaatccaggtacgcaggcggctggcatcggcaaaatgggtatatttgccaaacgcgtccatcactaccagcgccaccggtttattattgataaccgtacgcatcaccagacaatggcccgccgcattggtaaagccggttttggttaactgaatattccagttatcgcgatacaccagatgattagtattgcggaacggcagcgtatacgtcggattagagaaggttgccatatcttcccgggtagtacttaactgcccgatcaacggatattgtttgctggcaatgagcagtttggttaagtcacgggcagttgaaacgttatgcaccgacaatccggtaggttcaacaaagcgcgtgttgttcattccgagcgatttcgctttcgcattcattgccttaataaaggctttgtaaccaccgggataatggtgcgcaaggcttgccgccgcgcggttttctgaagacatcagcgccagcaacagcatatctttacggctgatttcgctattcagtcgtacgcgcgaatagacccctttcatctccggcgtctggctgatatccacttttagtttttcatccagcggcagtcgtgcatccagcacaaccatcgcggtcattaatttgctgatagacgcaatcggacgcaccagatccgggtggttcgaatagatcactttgttggtattcagatcaacaatcatcgcgctaccggaggcaatttccggttgtgaagcggtggtagcggctgccgttttcgcaacggcctgcggtgcaaaaggcacagccagcatcagggccaggctaaataaagaaactcgaaatttcggcatgatgagcattcagatagtggttcacgcgcacgggttgcgcaccgccggagtaaggatttactgaggctagcgacgccatcataacgagcaaaaagtgcgatcgtcaaaggagaatcgtgaggaaatgctgcattgctgacatttacgccagcaatgcaacgtcaaagaactttctagaacaaacgataaccgtagccccatagtataacggttagggcgagcagcacttccagtaccagcacgccaatcgccagcgtcgaactagagaagctaaggccttcctctttgttgatattcaggaagctcggaataccaaggtaaagcaggtagccggtgtaaaacagcgccaccgtgccgaccagcgcacacaaccagaccagtggataaagcgccaccagaccgcttaaaaacagcggagttgcaacgtagcccgcgaagaccatgcagtgcgcaagtgacggacgctgcggataattacgcgccatccaccagatgacccgccccatcaccgcgaccccagccagcataacgccgtaaaacaagacagccagcgccagtccggtaaaccaggataacttcaggatagtgccatcgccaaaattccagccaatctgtgtagtgccaatgaaggcgcaaatcaccggaatcgccgccatcagcaaaacgtggtgggtgtaatggtgagaaatcgtttcgttttcgcgattaatcacctgcatttcacgatcgggatgggaaaacagtccccagacatggctcataccgcccccttgttgtgagttcatgaacctgacagttcaagtataagtcagcttgtgattattttttgttcgcccatgtaattttcactgtctgatgaacgtcctttttcagcgtgaatgattcacagggtgtatgcttactggcaaccaaagggagacagactggcctatggatctcaatacacttatctcacaatatggttatgccgcgctggtgatcggtagcctggcggaaggtgaaaccgtgactttgctgggaggcgttgcggcgcatcaggggctattaaagttcccgctggtggtactttctgtggcgcttggcggcatgattggcgaccaggtgctctatctgtgcgggcggcggtttggcggcaagctgttacgccgtttctcgaaacatcaggataaaattgagcgggcgcagaaacttatccaacgccatccgtatctgtttgtcattggtacgcgctttatgtatggctttcgggtgattggcccgacgctgattggtgccagccagctgccgccgaaaatctttctgccgctgaatattctcggcgcatttgcctgggcgttgatttttaccactattggttacgctggtggtcaggtgattgcgccgtggttgcacaatctcgaccagcatttgaagcactgggtctggttgattctggtcgtggttctggtggtgggcgtgcgctggtggctgaaacgacgcgggaagaaaaagccggatcatcaggcgtaaaaccattgccctggataaggcgttcgcgccgcatccgacatccggagtaccatgcctgatacgacgcttgtgcgtcttttcatgccgaccaaaatattacccaatgaaatatccacgcacctcactgcgctattctgggttgaactgtggattcgccaacataaagccgccatccactatcaacgactgcccggtggtgtaatttgcgccctccgaacaaagccacaccaccaggctggcaatctcatgcgttgcgccaaaacgccgcaagggaatcgaaggctccgcgtcgggcttcacgtcgctgtcatccatgccattcattggcgtggcgatcgccccaggcgcgactgcgttcaccaaaatcttatgcctgaccagctccagcgccatcgctttggttaacccaccgagcgcatgtttagcggctgtgtaggcgctggcatccggcagcggcgtatgttcatgtaccgacgtaatgttgatgatgcgaccgccctgcccttgtttcaccatctgacgagccgcaatttgcgagcataagaatgcaccatcgacatcaacggtaaaaatcttgcgccactcatcaaaagccatatcaagaaacggcgctttggtcattgcacccgcattattcaccagcacatcaatgcgccccagccgttgaatgagtttctccagcgccagtgccccttctggtagattgccgagatccagctgcacgatctccgcacgtacgccgtggctaactacctcacgcgcggtatcttttgccccttcttcatctgagtgccaggtaataccaatatcaaacccctgctgcgccagtaataacgcgcactctttgccgatccccgaatcggaggcggtaataatcgcaacctgtgccatcgagttctccacttaacgctgaataaacgttaagtatagaaggcgcatatcatcagcgtttgtaccccccgcccaacgcaccagtgagttgaatggaggcatccagccactgcccttgcaataacaggccattggcccgctcacgcagcgcggggattctggcttcgctgacgcgggaaccagcaatgatgcccgcgttaaagcgcgcctgcgcaagacctaccacacgcaaggcatcgcgctcaatttgcgcctgatgctggtttttctccgccagtgtctgaacctgactggctgcccgcgccacgtcattcaccgcttcaaccaccgctttgttgtagctggcgatagacaagttgctttcggcttttgcgatatcgagattggcgttaagacgaccactatcgaaaatgggtagcgtcaggcctgccgtaacgcccatttgctgcgcggaatgacggaacagatcgcttaagtgcaacgcatcctgttgcaggaaggccatcaggttgatgtcaggataaaatgccgcttttgccgcatcaatggtgcttagcgatgactcaacgtaccagtgcgccgcctgcaaatctgcccgccgggccagtaaggagtaccccagttcatcaggaagctggcttgccactttcggcaacgcgaccggtttaagcttcaatgactttgtctggttatttgtaagtgcgcttaaccgtgcctcaataattttcattttccccgcgacatcgttgagctgctgccgggttttgctggcattaatatcggtttccacaccttcaactgaagaagtaatcccgttctgatatagctggcgatcggtcgcgataatggtgttctgctctttttctatttgctgcaagaccgtgtttaacgccgcctgggtttgccactcccagtacaggcgggctacgctgccagccagcaattggcgggtttgctcgcgttccgccgcccgtgctttaaccgtacccaggcgggcagtaacctccgcccgattctttccccagatatcgagatgccagcccgccgttaagccaaaagtaccgttggtgtaccacgggccggtcgtacctgcggccggatcgttcagagcaaacggccccattaagccttctgccgacattttttgccgctccatatccgccgaaaagtcgatctgcggaccatcctgagtggcaactgccttcgcctgggcttcagctagctgaatgcgctgttcagccacctgcatatccggtgcgttctgtagtgcattgttaattaaggaagtgagttgattatcgtgatactccagccaccattggctgtctggccaaccattttcagcgccgtgggtaatgcggtgtcaacttgtgcagcgggcgtttgctggcttaacgcctggcgggtttcatgcataggcgcacacccggccagcatcagtaacagcggaaaacaggcgatggctggataaaaggaatcacgattcatgggggaataatcaggtaagaaaaggtgcgcggagattaccgtgtgttgcgatatattttttagtttcgcgtggcaatacatcagtggcaataaaacgacatatccagaaaaatatacactaagtgaatgatatcttccgatttatcttaatcgtttatggataacggcaaagggcttcgttttttcctatacttattcagcactcacaaataaaggaacgccaatgaaaattatactctgggctgtattgattattttcctgattgggctactggtggtgactggcgtatttaagatgatattttaaaattaattaatgtcatcaggtccgaaaataacgagaatatttcagtctctcatcctgttgcgctcctgtcatgtgcattgcttcatataatcactggcgcaaggagcgcgcagggggcggccaatcgccgccgccccctgcacccccgggctctggcgaacaaaatcgccgctgcgcggtgccctcggcttatcccttacggctaccgggtcgggcgcgaggtaacatccctgtaaaacgcgccctcagcccacatccatgtgggctgccccggccttcagggaacgcctcggcaattttgacgccaccaaacaaccgtgcggcctattgataaagagctaacacattgtcaaaaaacatcactatggttttttagagtttctcgatatcaattgcctgaatagcccttgcaatatcaggggaattattcaacacccgaacatgctgaaataattccgttgcttcatcgtattctttacgcaaataactcaaccactgtttaatccgcgcaacgtgatataacccggtatcgccctgcttttccagacgggtatatttttgcagcaaagcaaccacctccggccacggcattcgcggttcgttatattttaccacccggctcaggttgggaatattgagcgccccgcgaccaatcatcactgcgtcgcagccgctgatcgccatgcattgttgcgcgctctgccagtcccagatttcaccgttggcaatcaccggaatattcagccgctggcgaatatcgccaatcgcctgccagtcaatatgctccgcgcggtaaccctgctctttcgtccgcccatgcaccaccagctccgtagcgccagcctgttgaaccgcatcggcgatttcaaatttcttctcaccgctgtcccagcccagacgcactttcacgctgacgggcaaatgcgccggtacagcttcacgcatcgcttttgcaccctggtagatgagttcaggatctttgagtaacgtcgccccgccgccgctaccgttaaccgttttcgacgggcagccgcaattgagatccacgccccaggaacctaactccaccgcacgggcggcgttctctgccagccattgtgggaactgacctaacaactgcacgcgcaccagcgtaccagatggtgtccggctggcgttttgtagctcagggcaaatgcgatgaaagacttttaccggcagcagttgatccaccacgcggacaaactcggtgatgcacagatcgtagtcgttaacttcggtcagcaattcacgcaccagagagtcaagcactccctccatcggtgccagtaacacacgcatatcatcacccgcaaaaaaatgaggcgctatgttagcgcctatggtcagcggattaaaggtctgcaaagagggattgctgcaaactgcaatccctctctatgcttgatgtatgcctgagttcgctgcgcattgcgtaatgccggggagcgaaaaaataagcgctgatttcttaatgtgatcggtagcacgttttacgaattaattgtatgatgaatccatctcatctggggtgttgattatgagtaagacactgaacattatctggcaatatttacgcgctttcgtcctgatttatgcctgcctgtatgcaggcattttcattgcttccctgctaccggtaaccattccgggcagcatcatcgggatgctgatcctgtttgtcctgctggccttgcaaattcttccggcaaaatgggtcaatccggggtgctacgtactgattcgctatatggcgctattgtttgtgccgattggcgtaggcgtcatgcaatattttgatttgctccgcgcacagtttggcccggtagtggtttcctgtgcagtcagtacgctggtggtttttctggtggtgagctggagttcgcaactggtacacggtgaacgtaaagtcgtaggtcagaaaggatcagaagaatgatggcgaatatctggtggtcattaccgctgacattgattgtcttttttgccgcccgcaaactggcggcacggtataagtttcccttgcttaacccgttgctggtagcaatggtggtgatcattccttttttaatgctgactggcatctcttacgacagctactttaaaggtagcgaagtgctaaacgatctgctgcaaccggcggtcgtcgcgctggcctatcctttatatgagcagctacaccagatccgcgcgcgctggaaatcgatcatcaccatctgttttatcggcagcgtggttgcgatggtgacggggacttccgtggcattgttgatgggcgcttcaccggaaatcgccgcgtcaatcctgccgaaatcagtcaccacgcctattgcaatggcggttggcggcagtattggcggtattccggcaatcagcgcagtttgcgtgattttcgtcggcatcctcggcgcggtatttggccatacattgcttaatgcgatgcgtattcgtaccaaagctgcgcgcggtctggcaatggggactgcctcgcacgccctcggtacggcgcgctgcgccgagctggattatcaggaaggtgcatttagttcgctagcgctggtgttatgcgggataattacttcgctgatcgcaccgttccttttcccgattattctggcagtaatgggctaaaatttgcgatgcgtcgcgcatttttgatgtatgtttcacgcgttgcataattaatgagattcagatcacatataaagccacaacgggttcgtaaactgttatcccattacatgattatgaggcaacgccatgcatccacgttttcaaaccgcttttgcccaacttgcggataacttgcaatctgcactggaacctattctggcagacaagtacttccccgctttgttgaccggggagcaagtctcatcgctgaagagcgcaacggggctggacgaagacgcgctggcattcgcactacttccgctggcggcggcctgtgcgcgtacgccattgtcgaattttaatgttggcgcaattgcgcgcggtgtgagcggaacctggtatttcggtgccaatatggaatttattggtgcgacaatgcagcaaaccgttcatgccgaacaaagcgcgatcagccacgcctggttgagtggtgaaaaagcgcttgcagccatcaccgttaactacacgccttgtggtcactgccgtcagtttatgaatgaactgaacagcggtctggatctgcgtattcatctgccgggccgcgaggcacacgcgctgcgtgactatctgccagatgcctttgggccgaaagatctggagattaaaacgctgctgatggacgaacaggatcacggctatgcgctgacgggtgatgcgctttctcaggcagcgattgcggcggcaaaccgttcgcacatgccttacagtaagtcgccaagcggtgtcgcgctggaatgtaaagacggtcgtattttcagtggcagctacgctgaaaacgccgcattcaacccgactctgccaccgttgcagggagcgttaattctgttgaatctcaagggttatgattacccggatatccagcgcgcggttctggcagaaaaagccgatgcgccgttgattcagtgggatgccacctccgcaacgctgaaagctctcggctgtcacagtatcgaccgagtgcttctcgcttaagcctggtgccggatgcggcgtgaacgccttgtccggcttgccagccctctcctggtgtcgaaattcccggcaaacagtttgccgtttcttgcgcaaaaccagcgggtaaagtagcctgatggaaattttccttagatcgagtctcctgcatgttaaagcgcgtgttcctcagcctgttagtcctgatcggcttgctgctgttgactgtgctcggcctcgatcgctggatgagctggaaaaccgcgccttatatctacgacgaattgcaggatctcccctaccgccaggtcggtgtggtgctcggaacagcaaaatattatcgtactggcgtaattaatcagtattatcgctaccgcattcaaggagcgattaatgcctataacagcggtaaggtaaattatctattactgagcggcgataacgcattgcaaagttataatgagccgatgaccatgcgcaaagatttaatcgctgctggtgtcgacccatcagatattgttctcgattacgcaggctttcgtacgctggattccatcgtgcgtacacgcaaagttttcgatactaatgatttcattattatcacccaacgtttccactgtgagcgagcattatttattgcgctgcatatggggattcaggctcagtgttatgccgtaccgtcaccgaaagatatgctgtcagtacgtattcgtgaatttgccgcccgtttcggtgcgctggctgacctttatatttttaaacgtgaaccgcgttttttagggccgctggtccctattccggctatgcaccaggtaccggaagatgcgcaggggtatcccgccgtcacacccgaacagttacttgaattacaaaagaaacaaggaaagtagttatggatgtacagcagttttttgtcgttgccgtttttttccttatcccgatattttgtttccgcgaagcatggaaaggctggcgcgcaggcgcgattgataaacgggttaaaaatgcaccggaaccggtgtatgtctggcgagcaaaaaatcccggactctttttcgcttatatggtggcatatatcggcttcggaattttatctatcggcatgattgtttatcttattttctatcgttaatattcccctctccagttaattattgagaataattattacttcacctgataagctgcggatatcacattcctaaccgcagctatttgtgaatcttttcacagtttaaattcccccgcacgcttagccttaatatcagtacattattatttactaaacgctcgccttaattacctatagcattaaggaagatcacatgccgcaacaaaattatctggatgaactcactccggcttttacgtctttactggcgattaaagaagcctctcgctgtttattatgtcacgacgctccctgtagtcaggcttgcccggcacagaccgatccggggaaatttattcgctcaatctactttcgtaattttaaaggcgctgccgagacaattcgcgaaaataatgccctcggtgccgtttgtgccagagtgtgcccgacggagaaattatgccaaagcggttgtacccgtgccggtgttgatgctcccattgatatcggccgcttacagcgttttgttactgattttgaacaacaaaccggaatggaaatttatcagcccggtactaaaacgctcggcaaagtcgcgattattggcgcaggtcctgccggattgcaggccagtgtgacactgacaaaccagggttatgacgtcacgatttatgagaaagaagcgcaccccggtggctggttgcgtaacggtattccgcaattccggttaccgcaatcagtgctggatgcagagatcgcccgtattgaaaaaatgggcgtgaccattaagtgcaacaacgaagtcggtaacacactcacccttgagcagctgaaagcagaaaaccgcgcggtactggtcaccgtggggttatcaagcggttccgggctaccgctgtttgagcatagtgacgttgagattgccgtcgacttcttgcaacgtgcacgacaggcgcaaggcgatatcagcattccacaaagcgcattaattatcggcggcggtgatgtcgcgatggacgtagccagcacgctgaaagttctcggctgtcaggcggtaacttgcgtagcgcgtgaagagttagatgagtttccggcaagcgaaaaagagtttaccagcgcccgggagctgggcgtttcgatcatcgatggattcacgccagtagccgtggaaggcaataaagtcacgtttaagcatgtacggttatcgggcgaactgacgatggcggcagataaaattattctcgccgtcggtcagcatgccagactagatgcctttgcggagttagagccgcagcgtaacaccatcaaaacacaaaattaccagacccgcgacccgcaagtctttgctgctggcgatattgttgagggtgacaaaaccgtggtctatgccgtgaaaaccgggaaagaagccgccgaggcgattcatcactatttagagggagcttgctcatgttaacgaaagatctttcgattactttttgcggcgtgaagtttcccaacccgttctgcctctcttcttcgccggtaggcaactgctatgagatgtgtgccaaagcctacgacacaggttggggcggtgtggtgtttaaaacgatcggcttttttatcgccaacgaagtctcgccgcgttttgatcatctggtgaaagaagataccggttttatcggcttcaaaaatatggagcagattgctgaacatccgttggaagagaatctggccgccctgcgtcggctgaaggaagattacccggacaaagtattgatcgcttcgatcatgggggaaaatgagcagcaatgggaggagctggcgcgcctggtgcaagaagctggcgcggatatgatcgagtgtaacttctcctgtccgcaaatgacttctcatgcgatgggtagcgatgtcgggcaaagcccggagctggtagaaaaatattgtcgggcagtgaaacggggttccacgctgccaatgctggcgaagatgacgccgaatatcggtgatatgtgcgaagtggcgctggcggcgaagcgcggcggcgcagatggcattgcggcgattaacaccgttaaatccatcaccaatatcgatcttaatcagaaaatcggtatgccgatcgttaacggaaaatcgagtatttccggatattccggtaaagcggtaaaaccgatcgccctgcgcttcattcagcaaatgcgcacccatccagaactgcgcgatttcccaatcagcggtatcggcggcattgaaacctgggaggatgcggctgagtttttattgctcggcgcagcaacgttacaggtgaccaccggcatcatgcagtacgggtatcggatagtggaagatatggcaagcgggttgtcgcattatctcgccgatcagggatttgattcgctgcaggagatggtaggtctggcgaataacaatattgtcccggcggaagatttagaccgcagttatattgtctatccccgtatcaatcttgataaatgtgttggctgtggacgctgttatatttcctgttacgacggcggtcaccaggcgatggaatggagcgagaaaacccgcacaccgcattgtaataccgagaaatgtgtgggttgtctgctttgtggtcacgtctgcccggtgggttgtattgagctcggggaagtgaagtttaagaaaggcgagaaagaacacccggtaacgttgtaaaaccagagacgcatccggcatttggttcctgtcgccggatgcggcttgaacgccttatccggcctacaaaaccatacaaatcagtatgttgagcttattgtaggccggataaaacgcgccagcgttgcatccggcatttggctcctgttgccggatgcggcgtgaacgccttatccggcctacaaaaccacacagatcatgatgttatgtgcgtttatgaccgaatgcggaccacattcacatcatttcttacgcgcgtatttcagtgaatccagcgctacggcgaagataataatcgcccctttgatgatgtactgccagtatgggtttacgccgatatacgtcaggccatagttgatgacggtaaaaataattaccccggtcaccacgccaatcaccgtccccacaccgccgctgaacgatacaccgcctaccacgcacgccgcgatagcatccagctcatacataaagccgaggttgttggtggcagagccgatacgtccggcttctaacatcccgccaaaggcatagaacacgccagacaacgcgtagatcatcagcaggttcaggccgacgttgacaccagatacttttgccgcttccgggttaccgccaatggcaaaaatgttcttaccgaagcgggttttgttccacaacacccagacgaacgccaccgcaatcaacgcgtagaaggtgatgtaagagagacggaaactccccagcgcgacaaagccctgagcaaaggtagagaagccactgtcaaaaccagaaattggcgacgccccgacaaagtcgtaatagagcgagttgatgccatagacgatgatcatcgtgccgagcgtggtaatgaacggcgtcacgttgagataagcgataatcagaccgttgatcaaaccgatcaccgcaccaatggcacagacaatcagaataaccagcgcaatcggcatcgtcgccatttccgggaacactttgttggcgttatccatggactgcaataatgtcgcagccaccactgccgccagccctacctgacgaccagcagaaagatcggtcccctgggtgacaattaaccctgccacaccgagcgcgataataatacgcaccgatgactgggtgagaatattacttaagttcaacagacttaaaaatgttgggtcctggaaaataataatcgccagcaaaactaaaagaacgacgtaaataccgccctctttcaggtaagtaagaaaacttttcttatttaacgcactcatgggaagcccctaatcttaaaggtgcaaagacgcaagacgcagaatttcgttttgcgttgttgtttttgtatcgacaattccggaaacgagaccattgctcatgaccagaatacggtctgttatccctaacaactcaggcatttcagaggagataataataatccccttgcctttcttcgccagttcggcaattaactgataaatttcaaacttcgccccgacatcaataccgcgcgtcggttcatcgagcattaatatttctggttgcgttagtagccagcgaccaataatcaccttttgctgattaccaccggagagcgaaccaatttgcgtccgatgacccggcgtttttacccgcatcgaatcaatcacccactgggtatcgcttttcatccgcgagttatccagtaaaccaactttatttttgtagttgcgaatattggaaattaacgagttaaaaccaatatccagataggcataaattcccgttgagcggcgctcctcagttaccagtgcaaatccatggtttatggcttcgttggcattatggttattgatctgtttgccgtgcaacgttatggtgccagccgatttctcgcgaataccaaataacgtctcaacaatatcggtacgtttcgcccccaccagaccggcaataccgaggatctcccctttatgcagatcaaacgagacatcgcgaatcgacggctggcgcagtgacgtcaggttacgtacctcgaggatgacttcgcccggtttgttttctttgtcagggaaacgctggttaagagaacgcccaaccatcatggcgatgatcttgtccatcgtcagtcctgccagcggttcggtggcgatccactgaccgtcgcgcaatacggtaacttcatcacataactggaagatttcttccattttatgcgagatataaacaataccgcagccgcgctcttttaatttacgaataatagtgaacagatgattgacctctttttcggttaacgaagaagtcggttcatccataatcacaattttcgcgttataggaaaacgctttggcgatttcgatcatctgcatttgcgaaacggataatgtgccgacgcgcgcacgcggatcgatatcaatatccagttcgtcaaaaatcgctttggtttcgcggtacattttgtcctgatcgacaaacatgcctttggtgggatatcgccccagccacatgttatccatcaccgaacgttgtaataccaggtttaactcctggtgtaccatcgaaataccattttccagggcttcttttgcagaatggaaatcgatctctttaccctggaataaaatggtgccggagtctttttgataaataccaaacaggcattttaataatgtcgattttcctgcaccgttttcccccattaatgcatggatagaatgtggccggacttttaaattaacgttatcaagtgccttaacaccaggaaaggacttgttgataccgctcatttccaacaagtattccccggaggacggagtcgttgagctgaccatataattttaccttgttggccatacaataagggcgcagtaatagactgcgcccaatcagtcttatttcttgctgaattcagccaggttgtctttatctacgccaacataaggtacgcggaccactttgttgtcgattttccagttggtgccatcagccgcacctttaccatcggccaggtttttcgccagatcaaaggtcgctttcgcctggttgttagcatcgttcagtacggtgcccgccagtgcaccggatttcaccagcgccagcgcttctggcagcgcatcgacgccaaacaccggaatgctggacttgttgtgtgctttcagcgcttcaaccgcgcccattgccatcgcatcgttgttggcgataaccacttcgattttgttggcgttcgggccagacagccaggcgtccatcttatctttcgcctgagcggtgtcccacattgcggtatctaactgtaactgttcagttttgatgcctttatcgttcaattctttaatcacgtaagtggtacgtgcttctgcatccggatggcccggttcacctttcagcagtacgaactgaatctgaccgtctttgttcagatcccaaccctgattcgccgcccagtgtttagcaatcaaatcgccttgaataatgccggactctttggagtcagtgccaacgtagtaggctttgtcgtagctatccagcgccttacgagacggttctttgttgaagaaaaccaccggcacgttttgcccacgcgctttctcaatcaccgtacccgcagctgccgggtcaaccaggttgattgccagtgccttcacccctttcgccagcaatacgtcgatctgatcgttctgcttggactggtcattctgagaatcattcatcagcagctgaacatctggcgcggctttcgcatcttgctcaatagccttgcgcactacagacataaagttatcgtcgtacttatagattgttacaccaatgcgagtatcagcagcgtgtgcagcggcaccgaataacatgctggccatcacagcagacagggttaacaccttcttattcatggtatctccggtttttcttatgcagggtagtgcttgagataaatgctcggcggggcagtagagttaatgaagtgttactgaacgccgaagctcactttttaaaattcgttcttccatgcccggtaacgctccagaaaacggctttaattgttgttatgacgctgttacctcggcaaaagtgattattcactgttacatacgggttacaacgttaaaacggtgcaatcatagctatcacattgttaagatactgtgaaatcactcacagattgaaagcggttacatcgcctgatttgttgagttagtgatcgccgccgcattctggcgtgttgcgacagaatggcgacgcactaacgtcggcataaaacagtggctggcacgaggatcaatattgcctgctgccccctgcaaggccagttcggtggctaatttcgccattgaagcaatgggataacgcacggtcgttaattgcgggtcggtgtaacgggcgatgggaatatcatcgaaaccgatgattgagagatgtaacggaatcgcaatgccattatcttttaatgctgtcagtgcgccagcggccatattgtcgttataagcaaatacagcggtaagttgtagattgcgccccagcagttcaaccatcgccgcctcaccgcccggcatgtccggcgtaccagcgccaatccagctttccggcggaataatatcctgctctttcaacgcactcatccagcctgctttacgcatggcgtcatcttcaatgccgtggctggaagaaagataaccaatacgttgatgaccgttattcagcaacatgcgcgtcgccattcgggcaccgctgagattatccaggcaaacgcaacgatgggcgtaccccggcacaacgcggttgattaacaccataccgggaatgttatccataaattgcgccagttcatcgtcactcaatgcttttgagtgaacaatcaacgcattacaacgctggcgaattaacacctcaatggcgtgacgctctttttccgcttcatgatagctattgccgattagcacgtatttctgatgctgctgagcgaccagatccaccgcttttaccagcgcgccgaaaaacgcatcagaaacgtccatcaccaccacgccaatggtgtcgctaacctgagttgccagcgcctgggcattggcgtttggccgataatccagctcactcacggctttcattactgcttcacgcgtgtcggcactgaccagcgtgctgttattgagcacccgggaaaccgttgccacagagacgccagcctgacgcgctacatcacgaatggtgatcatattcactacctgttatgagattgcagtaaatgactgcttgctggcggctattttgtcagcactgaatacaggacttcgtgaatcgagtcacagcaatggaaacggttacagccgttttgttaacgaatgtgatccagatcgttatcttgatgttttagatattgccggtccggcagcacgcaaagttaactgacgccagagccattccaccggcccctggcggaagtaacgcagccagataacagagaagaggatattcgccagccataccggaataacaaacgccagcagctccaggcggtcaaaatgcataaacaaaccgaggtggtaaaaaagcgtggtacaaatcagcgtttgcaatagatagttggtcagcgccatccgtccgacgcaggcgatcgcaagcaccagcttaaagcggctcaattgcggccagaagccataaaacagcgacgcatagccaatcgcctgaaacggcgcactcagttcccgcggcatttgaagtaagaaggcacaccagcgatacgcccagtccagctgccattgcagggcgatggcaggaaggttaatggtcaccccaatcgccaccagcacaaaaccagtacgacgatagtgacgtaagctgaactgccctttcagccagccgctgcgcatcagcgccgcaccaatgagcatcatccctgccagttgccagccatactgtgcgcccagtgccagtaaactgttgccaacaccatcggcacgattactgatcgcttcaacgccgccgtgaagcttccagtatttttcatacaaaatagccgatgcatccggcgtccaggcgcggctggtctggctgtcggaaatcagccccaataacagcaaaacgccaagccccaccagataaagcatgacgcctgtattaaacaggctttttaccgatggcgcatcgcgcaccagccgccagcagattaagcccaccagcccgtaagccagcaaaatatcgccgtcccagaacaataaaccgtgaataaagcccaacaagactaacagcgttaaccgcgactggatccagcgtctgccacggggcagcaacatttgcaggcccgcaccaaacagtagcgcaaaaagcgtgaggaatttcacctggccgatgagatcaagaaatgcccaagtccatgcatcccgcggcgtaatagcaccgtaccaggcgggattgagataagccgcctttggtagcccaaaggcgctgatgtttaatagcaggatccccagaatggcgacgccgcgaacaaaatcgagcgtgacgttgcgctccatggttcctgccttttaatcagttgtgatgacgcacagcgcgcagaaactcgtggcgcgtattctgactggatttgaacaatccaccaagagaggtcgttgtcgtggcactggttgcatcgcggatgccacgcgccttcacgcagtaatgcaccgcgtcgatcgagacagccacgttattggtgcccagcagcgtttgtagcgcaataagaatttgctgcgtcagacgttcctgcacctgcggacgctgggcaaagaactgcacaatgcggttaatttttgacagaccgatcaccgaatctttcgggatataggccaccgtcgctttgccatcgatggtaacaaaatggtgttcacaggtgctggtcagagtgatatcgcgcacggtgaccatttcatcgaccttcattttgttttcaatgagggtgattttcgggaaattggcgtaatccagaccggagaaaatttcatcgacatacattttagcgatgcgatgcggcgtttccatcaaactgtcatcagccaggtcgagattcagcagctgcatgatttcggtcatatgaccagcaataaggcttttgcgcgtttcgttatccatttcatgcacgggcgggcgcagcggtgtttccagtcctcgcgcaactaacgcttcatgaaccagggccgcttctttactgagtgatggcatttatgatttctcctgcaggtgtgacgcctccgccctgcgtgggggcaaagttattaagctgatttacagcctgattattgtgcgtgaggcggcgcacataatccagtattcacagcgataattattgtaattgccgctgcctttcatcagcagatgttaaaacatcgttatgcaaatacggaagtgaaagttactcacagcacattgaataaacggtatgatgaagaaattgcaaacaacacaacaaggagccacgcatggaaatgctcgaagagcaccgctgttttgaaggctggcagcaacgctggcgacacgactccagtaccttaaactgcccgatgacgttcagtatctttctccctccacctcgtgatcacactccgccaccagtgctgtactggctttccggattaacctgcaatgacgagaacttcaccaccaaggcgggtgcccagcgggtagcggcggaactggggattgtactggtgatgccagacaccagcccgcgcggcgaaaaggttgccaacgacgatggctacgatttaggccagggcgcaggcttttatcttaatgccacgcaaccgccgtgggcgacgcattaccggatgtatgattatctgcgcgatgaattaccggcgctggttcagtcgcaatttaatgtcagcgaccgctgcgccattagcggtcactcaatgggtggtcacggtgcgctgattatggcgctgaaaaatccgggtaaatacaccagcgtttcggcctttgcgccaattgtgaatccgtgcagcgtcccgtggggaatcaaagcgtttagcagctatttaggtgaggacaaaaatgcatggctggaatgggacagttgcgcactgatgtatgccagtaacgcgcaggatgcgatcccgacgcttatcgatcagggcgataatgatcagtttcttgccgaccagttgcaacctgcggtactggcagaagccgcgcgccagaaagcgtggccgatgacgctgcgtattcagccgggatatgatcacagttactacttcatcgcctcttttatagaggatcacctgcgcttccatgcgcagtatttactgaagtgaaagtccgcccggttcgccgggcatcttctcatcagaagcgataatccactgccataaagtaacgacgtccgtcttcgttatagctgtagtcgtcacgactgagatccttgtcgccaaggttcagcacgcctgcgcgcagtttgacgtctttagtcacctgccaggccgcgccggtattccagatggtataaccgcccggtgttttagccgtcgcgctgtcggcgcgtttctgcccggtatagtgcccagaaacatagaatgaccagtcttccagcgccagcggtttccagtccagcgtaccgttagcagtatggaacggcagatcggatagcggtttgttttcgccgttgctgacatcacgaccatcgttgtaggtgtagttgatcgacagtttccattcatcgttgaacggaattttcagttcggtttccacgccctgaatacgagctttgttaacgttgtagtagctaaataccggtatgcgccgtccgttagcgcccgtctcaaaaccaacaaagttttggtagcccggtgcagcgttgacgtcagacgtacggctgatgctgatacgatctttcacatcgttacggaaaacggtaacgctggattcaaccccttccagccagccttcttcacccatgtagtaaagccccagctcccaactttcgctggtttctggtttcagatccgggctacccacaatcttacatgcgccacggcaggaattgctcgtccagtcagggctaagttgcaacagagaaggtgctttaaatgccgtcgcccagccccctttcaccgttacggtgtcggtggcgttataaaccaggtaggcacgcggactccagtgttcaccgtaggtttcgtgatcgtccatacgcacgccggtcgtcagcgccagcggctcgaagatccgccattcatcttccacaaacagcgcgtactggctggcagacgttttggagctggttcccccggtcaggttcaccgcatcgctaagtttgtcgtgacgccattcaccgccaaccgtgagaaactgattaatcgccgtcagcggcaacgtgtatttgccgtcgaccgtattgctttcggaagttatcgggctgctgttgccagggtttttgttctcgactttctcaccgtagtatttcagttcgctggtgccgtaatcccaacgcccattatggctgacggagtagttctggcgttccaggcggtttttgtccagcgagtcggaatcacgatcctgacggtcgaaaccgtatccggcagtaaaatcgtgattttgattcggtgtccaggcaaattcgacattgccgtcgcggctggagaatccttcaatacgcggcgtttctccggtatcggtggtcgttgagttttgcgggtcatccttttcacgttttgccaggctgccgtaagctttcattcccagcacaccatcaattaatggtccactggtaaagaactgaccgttataggtgtcaccgcgatcgcgatgttcctgaatggtggtatcgacggtaacggtacccgaccatttctgaccgatttttttggtgatgatattcactacaccgccgagcgcatcggaaccgtacagcgacgacatcgggccacggaccacttcaatacgttcgatggaatcgaccgggatccagttcagatcgaaatcattgtggcggaagacggcattgcgggagttcacgcgtttaccgtcgacgagaatcagggtatagctgctgtccagaccacgaatactaacgcccttacggttatccccttcgttcgtcagttgtacgccaggcacttctttgaggacatccttcagattctgtaccggttttcgctgcaggtcttcctgggtaatgacgctgatactggcaggtgcatctttaagattttgttccacggaagatgcagtgacaaccatcgtttcgccatcatcatcgaccgctaacacaggccatgcacaagaaatagcggacaaacacagcccgacccgtacgaaagggttcaacctaaacattccatatctccatgaggtaactacgaaaataaaatgggttatcgctcacatcttcttcacgtccccttgcgtacggcagcatcgcggtggacttattttttatgcaggtgatcatcccagaaagccggaacagcctctgatttgtcagccttttttgattgcggcgtaacgataatgcaaacgataacaattatcaatccaaatgttaaattttatatccgcatgatttgtcagggaaatggaattgaaaaagccctctcggttgagagggcttagcaaggaagggaggaaacttatttcttatcgttctgcgggaacttcatttcgctgtagcgtacgaagtgagttcctttaatcagcttgtagccgaaccaaataatcaggaacagcgggataccaatatacgttgccgctacgccgccccagtcaatagtatctttcaggaacgcttcgtagttctggcccaaagtgataatcagacacagaatgaatgcgaagatcggccccagtgggaagaaacctgaacggtacggcagatcgttaatgtcgtgtccctgcaatacgtaaccgcgacggaagcgatagtggctaatggcaatccccagccaggcgataaaacccgtcatcccggaggtgttcagcagccacaggtataccgtctggttgccaaacatggaggtcaggaagcacagaccggcaatcaccgtcgtcgcatacagcgcattacgcggcacgccaccacgcgacagtttagcgaaaatgcgcggcgctttaccgtcacacgccagggtgtacagcatacgagtagacgcatacataccggagttacccgctgacagcaccgccgtcagaataactgcgttcatcaccgccgccgcagagagcagacccgcgtgctggaacaccagggtgaacggactaacgctgatgtctttaacatcgttacgcagcaggctcggatcggtgtacggaataatcaggctgataatcaggatcgcgaacacatagaacaacaggattcgccagaacacctgacgtaccgcgcgtggaatgtttttcgccggatcttcggactcgcctgcagcaataccgatcagctcggttccctggaaagagaagccgacaatcatagctacgccgatcatcgccgcaaaaccaccagcaaacggcgcttcgccgattgtccagttgctccagcccgcaggctgcgcgcctttgaagataccgataatcatcagcacgccaacgatgataaagacaataactgtcgtgactttgatcagtgagaaccagtattccgcttcaccaaagccacgaactgagatgtagttcagcaggaagataacgccgaggaacaacgcactccagatccagcccggtgtatccgggaaccaccagctcatgaccagctgagctgcaaccaggtcaacggcgatagtcaccgcccagttgtaccagtagttccagcccagcgcgaagccaaagccttcttcaacatagttctgaccgtaagtggcaaacgaaccggaaaccggcatatatgcagccagttcaccgagactggtcatcaggaagtaaaccatcaggccaatcagcatatacgagagcaatgccccgcccggacctgcctgagaaatcgttgcgccagaggcaacaaaaagacctgtaccgatggaaccgccaatggcaatcatcgtcaggtgacgcgcctttaattcacggcgtaagcccggcgcttctgtggttttagtttcggaaaccatacaaaaatgctatccatcttaaaaatgaggcgcgattgtagcagacgattggcaatccttccggcagaaatacacggttataagacaccttcatgatcgcccagggattataagtaaagcagccaatctcttttctggcgaatgcatgctgaaggcgctgcgtcacgaaatcgacacagcaccagcatgttcttgtacagcaacttaacgcggcacatttgcgggatcgcaatagtccagaaagcgccgtagcgcgttggaaaggtgtttttgccgatgatgtatacgccacaacgtacgcatcaggcgcggcagagggaccgcaacttcacttaatgtgcctgcctgcaattgatcttcaatcacacgtcgcgacaggcaactaattcccaacccatgacgcaccgcatgtttgattgcctcggagttacctaattccatcgccatctcaaacttcggtaaatgtgacagcaacagataatcgacaatctcccgcgtgccggaaccgcgttcacgcaggatccacggcgcagcggccagctgttctaaggtgaccggaccacgggccaacggcgaagtcggcgcggcgaaaaccaccagctcgtcttccagccacggttcagaaatgatttcagtgctgtggcacggtccttcaataaagccaatatcaacgcggaaatccagcaccgcttgcatcacgtcctggctattcccaacgctaagttcaatcggcaactgcggataatcatggcgataacgggcgataactgcaggcagaatgtagttaccgatggtactactggcatagatacgaatcgcgccgttgtcttcgcgaaacagttgttcgatttcaaccgcctgttcaagcaatgccaacgcacgcggatagagcagccgcccgtgttcattaacaaccagtcttttccccacgcgatcaaacagttgcacgccaagctgcccttccaggtcggtcaaggctgcgctcactgctgattgcgacaacgccagcatcaccgacgcctgggtggttgatccacttttcaatacttctgcaaaaacttccaactgccggagggtgatgtgcatagtcgcttaccacttataaagattaattataaatatataatcaattttatttttaaaccagttagtcgtaaccttatgcccggttaaaggagagggttatgacgaatatcaccttacagaaacaacatcgtacactgtggcattttattccggggttagccctgagtgcagttatcaccggggtcgccctgtggggtggttccattcccgcggttgcgggtgccgggtttagtgccctcaccctcgcaatcttgttggggatggttttaggcaacaccatctatccgcacatctggaaaagctgtgacggtggtgtgctgtttgccaagcaatatttattacgtctgggtatcattctttatggcttccgtctgacgttctcgcaaattgccgatgtcggtatcagtgggatcatcattgacgtgttgacgctgtccagtaccttcctgctggcttgcttcctggggcagaaagtgtttggtctggataagcacaccagctggttgatcggtgccggtagcagtatctgtggtgctgccgcggtactggcgactgagccggtagtgaaagcggaagccagtaaagtaaccgtggctgttgcaaccgttgttatcttcgggaccgtcgcgattttcctctacccggcgatatatccgctgatgtctcaatggtttagtccggaaactttcggtatctacattggttctactgtgcacgaagtggcgcaggtggtggcggcaggtcatgccatcagcccggatgcggaaaacgcagcagttatttccaaaatgctgcgcgtgatgatgctggctccgttcctcatcctgctggcggcgcgtgttaaacagctgtctggggcgaacagcggcgagaaaagcaaaatcactattccgtggtttgccatcttgttcatcgtagttgccatctttaactcgttccacctgttaccgcagagcgtggtgaacatgctggtaacgctggataccttcctgctggcaatggcgatggcggcgctgggtctgaccactcacgtcagcgcgctgaaaaaagctggggcgaaacctctgctgatggcactggtactgtttgcctggctgattgttggtggtggtgcgattaactatgtgattcaaagcgtcatcgcataaaccactacatcttgctcctgttaacccgctatcattaccgttttcctccagcgggtttaacaggagtcctcgcatgaaatacattggagcgcacgttagtgctgctggcggtctggcaaatgccgcaattcgcgccgccgaaatcgacgcaaccgcgtttgccttgttcaccaaaaaccaacgtcagtggcgtgccgcaccgctcacgacgcaaaccatcgatgaattcaaagccgcctgtgaaaaatatcactacacatcggcgcaaattcttccccacgacagttatctgattaacctcggacatccggtcactgaagctctggaaaaatcgcgcgatgcctttatagatgaaatgcagcgttgcgaacagctggggctttctttgctcaacttccaccctggcagccatctgatgcagatttcagaagaggattgccttgcgcgtattgccgaatccatcaacattgcgctggataaaactcaaggtgtgacagcggtgatagaaaacaccgccggtcagggcagtaacttagggtttaaattcgaacatctcgcggcgattatcgacggcgtggaagataaatcccgcgtcggcgtctgcattgatacctgccatgctttcgctgccgggtatgatttgcgtactccagccgaatgcgagaaaacattcgcggattttgcccgtactgtcggctttaagtatctgcgcgggatgcaccttaacgatgcgaaaagcacctttggcagccgcgttgaccgccatcatagcctcggtgaaggcaatatcggtcatgatgcgttccgctggatcatgcaggacgaccgtttcgacggcattccgctgatcctcgaaaccatcaacccggatatctgggcagaagagatcgcctggctgaaagcgcaacaaactgaaaaagcggtagcctgaagatgaataaccgggaaaaggagatccttgcaattttacggcgtaacccgctgattcagcagaacgaaattgcggacatgctgcaaatcagccgttcgcgcgttgcggcgcatattatggatttaatgcgcaaaggccggattaaaggcaaaggttacattctcaccgagcaggaatactgcgtagtggtggggacaatcaatatggatattcgcgggatggcggatatccgttacccgcaatcggcttctcatcccggtacaattcattgctcagcgggcggcgtgggacgcaacatcgcccacaatctggcgctgttaggccgtgacgtccatttgctttcagtgattggcgatgacttttatggcgaaatgctcctggaagaaacgcgccgtgccggcgtgaatgtctccggctgcgttcgtttgcatggtcaaagcacatcgacgtatctggcaattgccaatcgagacgatcaaaccgtgctggcgattaacgatacccatctgctggaacagttgacaccgcaactactgaacgggtcgcgcgatttacttcgtcatgcgggcgtggtactggctgattgcaacctgacagccgaggcgctggaatgggtctttaccctcgctgatgaaatcccggtgtttgtcgataccgtttcagaattcaaagcgggcaaaatcaaacactggctggcgcatattcacaccctgaaacccactttaccggagctggaaattttatggggacaggcgatcaccagcgatgctgaccgtaataccgcagtgaatgcattgcatcagcaaggtgttcagcaactgtttgtttatttgcccgatgagtcagtttattgcagcgaaaaggatggagaacaatttttgctgaccgcgccagcgcatacgacagtagacagttttggtgctgacgatggttttatggcgggcctggtatatagctttcttgaaggatacagtttccgcgacagcgcccgttttgcggtagcctgcgcggcaatttcgcgcgccagcggcagcttaaacaaccctaccctgtctgccgataacgcgctttcattagtgccaatggtgtaacaatgttgccggatgcgacgcttaacgcgtcttatccggcctacaaatcaggcaatttcagcaagtaaatgtaggcctgataagcttgcgcatcaggcaatgacactcaagctaaaccaataaagaacccggcaatggtcgcactcatcaagttggaaagcgtcgccgccgccagcgcccgtaaaccaagctgggcgatttccggcgcacggtgtggcgcaaccgcagaaaacgcccccaccaccaccccgatagaaccaaagttagcgaaaccgcacaacgcgaaggaaataatcgccacagttttagcatcgagagtgccagccgtttgcagatagggtgagaaattgagataagcgacaaattcatttattgccagtttctgtccaatcaaactcccggcaagattcgcatcactccagtccacacccatcacccacgccagtggagccagcaggtaacctaaaatggactccagcgaggcatgttcaaaaccaaaccagccaccaacgccgccgataataccgttaatcaacgcaattattgcaacaaatgccatcaccactgttgccacacctgcggcgattttcagcccggtcattgcccctgtcgcagcggcttcaataatgctttttggcggtgtttcggtgaaagagaggttattaaaggaaacctgcgaagattccgttgccgggcttaacaggcgggcaaacaagatcccgccagggatcgccattaatgatgccgccagcagatattccacaggcacgcccagtgcggcgtaaccaatcattgtcgaaccagcaatcgaggccatgccactacaaatcgctgtaaataattcattgcgattcagacgatcgataaagggtttgacgattgccggaatttcgttttgcccgaggaaaatggtggtgaccgcgacgaatgactcgatcttgctgatatttaatgctttctggaagataccgccgagaattcgaattaaaatccccatcacaccgatgtagtagagaatactcaccagcgcggtgacgaagataattgccggtaacaccctgaaaccaaagataaatcctgcaccatcaaataaggtatccattttcggtccgaccagagaaccgaagataaatgcgctacccgcgtcgctgtacgccatcactttatgcacgccaaaagcgactttttcagcgacccaacgccctggcggtaaccaaagcataatgccgccaatcacgacctgtaacactaacgccgcgccaacggtacgcaggctgatcttcttcttgtttactgacagtaaaaacgcaatcgtcagcaataccaccattcccagaacacttctcatgacatccatagtgattatctcttcatgtcatattgggcgacggctttctgcccatcagaaatagccaggcctgcatcttgcgataccggcccggcttgttatcaacacttaatgggttttgatgtagccgcgcacgcactcttcgactaatccccagaaccagtctgtatcaatagtgatgccgactttggtattggcgggcttgccaagaacgcccagctcgtcgcagacggtacgcccatagcaagggccactgttgacgtccacttcgacgtacatctcctgggttttaatgccatcagggttaatcagataaccgatgcaggtggcgtcgtgcaccgggccgccagcaaggccgtagttttcgaactgcgttttgagagtgaagttcatgatgtcgctgaacagctctccggcggggccgcctgccctttccatccgagcaatcacgtccggggtgcaaacggtctggttggtgagatcgaggcccatcatcactaatggaacgccggaggtgaacactacgcgtgcggcttccgggtcggcaaagatgttgaactcggcagatggcgtgaagttgcctgtaccgtaagcgccgcccattagcacaatttcacggattttgggcaggatcgcgggttgcatacgcattgccaccgcgatatttgaaagcggaccaaccggcaccagagtgatatcgccatcgcttgccatcagggtatcaatgatatatttcaccgcatgagtgctttctgcctggcgggtcagcggctcgaataccgggccatccagtccggtttcaccgtgaatattatcggcaacgatttgttgacgcataatgggctgcggcatccccgcataaaccggaacattaatctccagtttctggcaaacattcaggccattaattaatgttttatcaagcgtctgattacccgctacaatagtgatgcctaataaatctattgccggatgtttcgccgccatcattatagcaatagcatcatcatgacccggatcacaatccagaataatttttctcttttccattgtttatttcctctgtttccagttgcgttattttttctacagcaaagaaaattcgaccgggccgatgattgaatcttaacaacagcgtacgtatgctaaatatgagaaatctcatagcggataaacatcgtgaaagaaatccacaataatgatcttaagcagcaattgatgagtgaatccgcgtttaaggattgctttttaacggatgtttcagccgatacgcggctgtttcattttttagcgcgtgactacattgtgcaggaagggcaacagccgtcctggctgttttacctgacgcgaggccgcgccaggctttacgccacgctagctaatggtcgcgtgtcgctgatcgatttctttgccgccccctgttttattggcgagattgagttaatcgataaagaccatgaaccgcgtgcggtgcaggctattgaagagtgttggtgccttgcgctccctatgaaacattaccgtccgctgttattaaacgacacgctatttttacgaaaactctgcgtcaccttaagtcataaaaattatcgtaatattgtttctttaactcagaatcaatcatttccgttagtgaatcgcctggcagcatttatattactctcgcaggaaggtgatctttatcacgaaaagcatacgcaagcggcagagtatttaggcgtttcttatcgacatcttttatatgttctcgcgcagttcattcacgacggtttattaattaaaagcaagaaagggtatctcattaaaaacagaaagcagttgtcaggactggcgctggagatggacccggagaataaattctccgggatgatgcagtaaaaattattttcaatagcgcgattgccggatgcaacgcttaatacgttttatccggtctacaaatcgagcattacgccagaccaataaagaacccggcaatagtcgcactcatcaggttggaaagcgttgctgctgccagcgcccgtaaaccaagctgggcgatttccggcgcgcgttttggcgaaatagccgaaaatgcgccaacgacaacaccgatagaaccaaagttagcaaaaccacaaagcgcaaaggagataatcgcaatggttttcacttccagcgtgccgcccgtttgcaggtatggggagaaactcaggtaagcgacgaattcgttaatcgccagtttctgcccaatcaggctacccgcaagattggcatcactccagtccacacccatgatccacgccagcggtgccagcacatagccaaaaatactttccagagaggcattggcgaaaccaaaccagccgccaattccgccgataatgccgttgatcagcgcaataattgcgacaaacgccattaccaccgtcgccacaccagcggcgatttttagcccggtcatcgcaccgctcgccgccgcttcgataaagctttttggcggcgtttcgctgaacgacagattttcaaatgtgacctgcgaaggctcggttgccgggctaagaatacgtgcaaacaaaatcccgccagggatcgccatcagcgatgccgctaacaggtagtcaattggtacgcccattccggcataaccaatcatcatcgaaccagcaatggacgccatcccgctacaaattgcggtaaacaactcgttgcgattcatgcgatcgataaacggtttaacgatcgccgggatctcattttgcccgaggaaaatagtagtaaccgcaacaaaagattcgattttgctgatgttgagggctttctggaaaatgctgccaaggatgcgaatcagcagccccatcacgccaatgtagtacagcagactgatgagcgcagtaacgaaaataatcgccggaagtacgcgaaaggcgaagataaaacccgcaccgtcaaacaggacatccattttcggcccaaccagcgaaccaaaaatgaaggcgctaccggcatcactgtaagacatcactttatgaacgcctaatgccgcctgttctactgcccattttcccggtgggaagtagagcatgatgccaccaatagcgatttgcagcagcagtgcggctccaaccgtgcgcaaactgatgctctttttattcactgacaacagaaatgctattgccagtaacaccaccatccccacaacacttctcattatatccataatgattttcccttcatgccggtaaacccggcgtcagcgccaggttttggtatgcttgatgagtacgggcgacggctttctgcccgtcagaaattaacccgcgagacgctgatattctttggcaatttcgctcgccagaatggcgttgttgaacaccagctggatgttggatttcaggctgtcaccgccggtcagttcagcaacgcgcgccagcaggaatggcgtactttctttaccaatgactccctgagcttcagcttcagctaccgcctgatcgatcgccgcattgatagtgtgttccggcatagcaaactgttccgggatcgggttcgctaccacgaggccaccgttcagaccgctttgccatttcaccaccattgcacgggcaatttcgctggcgctgtcgagacgaatgctgacgtcaaacgggctggtgcggcagaaaaacgcaggcagcgctttagtctgatagccaattaacggcacaccgaaggtttctaaatactcagtggttaatcctaaatcgagaatagatttcgccccggcacaaacaacggtgacattagtatttgccagttcttgcaaatcggcagaaatatcgaaggtatgttccgccccgcgatgcacaccaccaattcccccggtggcaaatactttaattccggcaagcgccgcaataatcatcgttgaagccacagtggttgcgccattttttccggcggcaacaacaaaaggtaaatcgcgacgactaactttggtcacgttatgcccttcacgacccagtaattcaatttcttctttgcttaaccccactttcatcacgccgccaataatggcgatcgtggcaggtacagcgccctgtttacgaatagtttcttcaacttcaattgcggtctgggcattttgtgggaacggcatcccgtgagaaataatggtcgattccagcgccacaaccggttttttgttttttaaagcgtcctgcacttccggggaaatttgtaataattcaggggaaatttttaattcagacattctgcgttctccactaacgatataacgttggcaatcgataaatcggggttattggtgtattcacaggagagcgccattgacgaacatccctgtgcgaaacgaacagattcggcaaacggcattccgtctacccaacacgaagcaagtcccgccatcatggcatcgcccgctccggtaacattaataacattggttttgatcggcgcagaccagccactttcaccgctgatatcgctgtaataaacgccgtcgccgcccatgctcaataccagtcggttcaggccatgttgatggaaccaggcagcaacttttgccacatcttcacgccctgacagcgcaatcccactcagggtttccgcttcaaggcggtttggcttgagagtgtggatctgatttagacggtcgcgcactttgacacatttccatgccgaaaccggatcgacaaatacgggtacgttggcggcattatccagaatccatgccagtgcctcttcactgatattacagtccgcgacaatgacctttgccctctgaataaattcaccgtgctgtgcgagatattcagctgtaatagcgttgctaatattcatgtcatttatagcaaccagcatttcaccggtattatcgagtaatgataaataactcgacgtattttctcccggcacaatcaggcatttatcgacataaacgccagattgattggtttgcgttagcagcgattgaccataaaaatcactgcctacggcgctcagtagccaggctttgttacccagcaacgccaggttttgtgcaatattgcgccctactccaccaggcgtaaattttattttacctggatttgaatccgcataatttaatgattcatgtgaatatccggcgacatcaatattcgccgaacctataattacgacataatccttttcgcgcatagcacgtcctctggtaaaaaattaccaaccctgtcaatccacaagaatatagatactgcaaagacggtttaaacatgtgttcatatttaaacatgtgctcatagtatgcatgttttacgtaaagtaaattaccgccagagaggcaaaatgggcagatttgagcaggctcacaaaatgcgattaaatgcctgaattacaaaagcgaggaatttgtgacgggatgcacagaacagaacaataaaaaagggcagaaaataatctgcccttgaggaaataacctgagtgtttgatgaacgtttgaagtttctactgaaagataaaaccatttaaattcataaaattacattcacaaaccggtcattctctttgcgctcatcaaatgttacaggacaggaaatttctgccctgtaacacaccttttattacgctgctttcgctactgcgtccacttccggacgtttcaggaaggcataggccaaacccgccaccagcgtaccggcaataattgctaccaggtaacccaataccggcgtaatagcgccagggatcagcagaacaaacagaccaccgtgcggtgccatcagtttcgcaccaatcgccattgagattgcgccagtcagcgccccacccacgatacagcacggcagcacacgcatcggatcacgagcagcaaacggaattgcaccttccgaaatgaagcacagtcccaataccagagcggctttgccaccttcctgctgcgctttgtcgaatttgcgacgcgccaccattgttgccagacccattgccagcggtggcaccatacctgccgccataatcgccgccatcgggccataggtttgagtactcagcagacccacaccgaatgcgtacgctgctttgtttaccggaccgcccatgtcagtacacatcatgccaccgaggatcgcccccagcagaaccgcattcgcagtccccatggtctgcagccagtgagtcagcccttcgagaatgccagcaactggtttaccgatcaggtagatcatcgccagaccgaccaccagactggaaattagcggaatgatcaggatcggtttcagcgcctccatactctgtggcagtttcaattgcgtactgattaacttcgcaatgtaaccagccaggaagcccgcaataataccaccaatgaagccagaaccggtgctgaccgccagcataccgccaatcagacccggagtgaggcccggacgatcggcaatggaaaaggcaatataacctgccagtaccggcaccatcagcgcaaaggctgaaccaccaccaatctgcatcagcgccgcagccaacgtacccggctctttaaacgcttcgataccaaaagcaaaagaaagcgcgatacacagaccacctgcaacgaccatcggcagcatgtaagaaacgcccgtcagcaagtgacggtatgcgcctgcactctctttcttactttcagtggtcgccgtttgagctttgcccgccggttcatacggcgttgcttcagcaaccgctttatccagttcctgcgcggttttcttcagcgccagaccggtagaggtacgatacatcggtttaccagcaaatttcgccagatccacttcgatatctgccgccacaatcaccagatccgctgctgcgacttcttcgggagtgattgcattacccgcgccaacagaaccacgggtttcaactttcacccaccagccacgttttttcgcttcggtttcaatggcttcagccgccataaaggtgtgtgctacgccagtcgggcaagcagtcaccgcaactacgcgtttcggaccgctggcggcaactggtgctgtcgcagcgaccggcgcagtgtaaggtttcgcatggcctttggcttcactcaggaacagctcagggtgcgcaactgcccgggaaatatcgcccagccagacatttttaccgttcagcgcgctgtcgttcgggatggaatcaccgagaacaatcgccatttcagcgtcgttcggattgtcgatgatttccagttttgcttttcgcgccgccgcgcccagcagggtcttcgccatataggcgcgtgcctgaccgagattagcgtcaataatcagcagcgttttcattatgcctctcctgctgtcagttaaaaggttgtaagtcgacgcgcgccatcattgcggccaactgcggacgatcggtaatacccacattgctttgacttaccgccagggctgcaacagctgtcgccagacgcagtgtgtgttcactggattcacgcatcagcaagccataaatcaggccaccaaccatagaatcccctgcgccaacggtgcttacgacatcgactgacggtggtttggcgatccattcgccggaggcattaacccaaagcgcgccttcggcacccagtgaaataacaacatgcgcgatgccttgttcacgtagcgcatgtgcagcttcaatcacatctttcatttcaggcagtttacggcctgcccagatttccagctcgcggcggttaggtttcaccagccacggtgccgctttcaaacctgctactaacgcttcacggctactatcaaagataatgcaaggacactgactacgcaggcgagtcatccagtcggtgaacgcttccgggctgacgcctgacggtaagcttccgctgacacagaccatatcgaactgaccgagccagctcagagaatcagtcacaaagcgttcccagtcggcgggggtgacttcaaaacccgagaagttgaagtcggtcacttcgccgtctttttccgtcagcttaacgttaattcgggtgcgcccctgtacaacctggaaacggttggcaatgcccagctcgctgaacagttgctgaaaaccatcctgattgtctttacccaggaagccgccaacggtgacatcaattcccaggtcttttaatactttggccacgttgatgcctttacccgccgcatgcagaccggtggttttcaccaggttcacttcgccgcgttcaatttccgggcagaaaccaacaaggtcataagccggattaagggtgatagtagcaacacgtctgctcattatgcgccctccccaagaccagcagcgatagcgtcgccgattgctttcagcgcctgttcagcatctgcaccctgggcggtaaagcgtaggcgatgacctttcttaacgccaagtgccacaactttcatcagactacgtccgtttgccggtttgccggtaccatcaaggtttgtcacggtaatatcactgttaaattgtttaatggtattgaccagcatggtacctggacgagcatgcaggccgtgttcattgcgcaccacaaactccgcgcttaacacgtcgtcggtcggcgcatcatcgctggtcagcagcgccagcaacgttgccgcatccgctttcagcaagcggtcagctttattgtcgagcaataaatcagcgagacgcttaagaaccgcgatgggctgatcgtcattcatcgccacactcaccagcatggctgccgtttcgccgtccacatcaaaagcatttgccgcacggcttaccgcaatcgcgctacgcagattgccttcggcgctatcgctcagccagataccctgtccgagattcagcggttgttcattgatggctttggtgacgaaagtggcgtcaactgcccccgcctctttcagacgcgcagcgttcagcgcctgaagagtcagcagatcgctggcgacgatatccagtgtcagcatttcgttgtcgagcttcagctgctcactctgcttttcgcccatcagtaatgcgcgaagttcttctgctgttgttgctgacttcagttgttcagcaacggaatcatcgctcagtacgtgggtcagctggcgtagcaggcccagatgttcatccgagctggcagcaataccgattgccacgtacgctacctgaccgtcaccccaggtgacgccttccgggaactgaaatacctgaacgccggttttcagcacctgatcgcgggtgtcggtagtgccgtgtggaatagcaataccattgccgaggaacgttgaggtttgctgttcgcgcgccagcatgccattgacgtagccttctgctacattaccggcctgcaccagcgccgcagcgacctggcgaatcgcctcttctttgtctccggccttttcgcccggatggatgtcctgtacggataactggaacatagttctcctctcttgctgaattgaaacgattcagcctctatgagaaaaaaagcgccaacctggcttagggttaaagacaagatcgcgctgaaacgtttcaagaaagcataatacttctgtttcagcacgcaaggaaagccgtaaagttatgagcaaaagtttgatgtgctgcacaattttttgccatttttcctaattgctgatgggaaaatccgttatcagcaatttcatttcagcagcgtcagcagccaatcagcaacagtgaaatggcattttgactattcgtggcgcttttgatttcgctgtctgtttattttctgacaagcagcgtaaactccgcgtcttcctcttccagtgatcgaccagcatgcataactcccccgcagtctccagcgcgaaatcgtttgacctgacctcgacggcgtttttaatcgttgcctttctcaccggtattgcgggcgctctgcaaaccccgacactcagtatttttcttaccgatgaagtacatgcccgtccggcgatggtgggattcttctttaccggcagcgctgtcattgggattctggtaagtcagtttctcgccgggcgctctgataagcgcggcgatcgcaaatcgctgattgtcttttgctgcctgttaggcgtgctggcctgcaccctttttgcctggaatcgcaactactttgttttgctattcgttggcgtctttcttagcagctttggctcgaccgctaacccgcaaatgtttgcccttgcccgtgaacatgccgacaaaaccggacgtgaggcggtgatgttcagctcttttttacgcgctcaggtttcactggcatgggtcattggcccaccgctggcttatgccttagcgatgggtttcagctttacggtaatgtatctgagcgcagcggtagcgtttattgtttgcggtgtgatggtgtggctgtttttaccgtcgatgcgaaaagagcttccgctggcgaccggcacgatcgaagcgccgcgccgtaaccgtcgcgatacgctgctgctgtttgtcatttgtacattgatgtggggctcgaacagcctgtacatcatcaacatgccgctatttattatcaacgaactgcatcttcccgagaaactggccggtgtgatgatggggaccgccgccgggctggaaatcccgacgatgttgattgccggatatttcgccaaacgtctgggtaagcgtttcttaatgcgcgttgctgccgtgggtggcgtctgtttttacgcaggaatgctgatggcgcattcacctgtcattctgttgggcttgcagctgctaaatgctatttttattggcattctgggcggcatcgggatgctctattttcaggatctgatgcccggtcaggcgggttcagccaccacgctctataccaacacttcgcgcgtgggctggatcatcgcaggatcagtggcgggcatcgtcgccgagatctggaattatcacgctgtgttctggtttgcgatggtgatgattatcgccactctgttttgcttactgcggattaaagatgtttaaggcgcggtcagcatttccagatcgataagccaggtcatggcctgctgacgcgagttaccgcacatttcagcgctggcttgtaagcctgcacagactttcggtcgcagtggcgaggtgaaaattttacagcgttgctgttcatcaagctgaatgcagggcgtattggcgggcttgccatctggcataccgggaatagggctggaaattgaaggggcagtgcaacacgccccgcaacccggacggcattccatacgttgttctcttaaggttaaccaccggattgatgagcgcgcacagtaccaccttttttgcaccagcaaaagtgcgaataccacttgcccgaaaggcccgtcgcgagtactttgtcgcgatatttttgacattttcgactacaggaatttttcgatgccaagagcgaacgaaattaaaaaaggtatggtactgaattacaacggcaaactgctgctggttaaggatattgatattcagtcgcccactgcccgcggtgccgctacgctgtacaaaatgcgtttttctgatgtccgtaccgggctgaaagtagaagagcgtttcaaaggtgatgatatcgttgacaccgtgacgctgacccgccgttacgttgacttctcctatgtcgatggcaacgaatatgtctttatggataaagaagactataccccgtataccttcaccaaagatcagattgaagaagagttgctgtttatgccagagggcggcatgccggacatgcaggtgctgacctgggacggtcaactgctggcgcttgagctgccgcagaccgttgatctggaaatcgttgaaaccgcaccaggcatcaaaggggcatctgccagcgcccgtaacaaaccggcgacattgagcactggtctggtgattcaggtaccagaatacttaagcccgggcgaaaaaattcgtatccatatcgaagaacgccgttatatggggcgtgctgactaacttcagccgcatgcagaaaagggatagctcaggctgtcccttttttaatttattataccaatcttctattttgcgcttcctgaacaccttacgccctcaattttcactcgttgattgatcgccctcacacttcatcgcattaacaatccagaccaatttcaattgctgtcatataactttacactgtcgttgttaattaatcgttactaagacgtgactcctatgaatacaatcgcctccgttacgctcccgcatcatgtacacgctccacgctatgatcgccagcagttgcaatcacgtatcgttcattttggctttggagcctttcaccgcgctcatcaggcgttactgaccgatcgtgtgctgaatgcccagggcggcgactgggggatctgtgaaatcagcttgttcagcggtgatcaactgatgagccagctccgcgcacagaaccatttatataccgtgctggagaaaggtgcggacggcaatcaggtgataattgtcggtgccgttcacgaatgccttaatgcaaaactggattccttagcggcaattattgagaaattttgcgagccacaggtggcaattgtttccctgacgattaccgaaaaaggctattgtattgacccggccaccggtgcactcgacaccagtaatccgcggattattcacgatctacaaacccctgaagaacctcactccgcaccgggtattctcgtcgaagcactgaaacgccgccgtgagcgcggccttacaccgtttaccgtgctctcctgcgacaatattcccgacaatggtcatgtggtgaaaaacgcggtgctgggaatggcagaaaaacgttcgccagaactcgccgggtggataaaagagcacgtcagttttccgggaaccatggtcgaccgcattgttccggctgcaaccgacgaatcactggtggaaatcagccagcatctgggggtgaatgatccctgcgcgattagctgcgaaccgtttatccagtgggtggtggaagataacttcgtcgctgggcgtcctgcctgggaagtcgcaggtgtacaaatggtgaatgatgtcctgccatgggaagagatgaaactgcggatgcttaatggcagccactcttttctcgcttatctgggttacctctcaggattcgcccatatcagtgattgcatgcaggatcgcgcatttcgccatgccgccagaacattaatgctggatgagcaagcgccgacactgcaaattaaagatgtcgatttaacacaatatgcggataagttaattgcacgttttgctaatccggcgctgaaacataagacctggcaaatcgcgatggatggcagccagaaattaccgcaacgcatgctggcaggtattcgcatacatcaggggcgcgaaacggactggtcgttgctggcattaggcgttgcaggctggatgcgttacgtcagcggcgttgatgatgccggaaatgccattgatgttcgcgatccgcttagcgataaaattcgcgaacttgttgcgggcagcagcagtgaacaacgcgtaaccgccctgctttccctgcgtgaagttttcggtgatgatctgccagataacccgcattttgtgcaggccatcgaacaagcctggcaacaaatcgtacaattcggcgcacatcaggcgctattaaacaccctcaaaatttaacgatttctgcggttaaagcggatgaagctcaccttcgtccgctctccccttctcttttctgccttttttagccaggattaacgctcagttaacttaccagagtattgcggagccgttgtgaccaggaccaacctcatcaccggttttctcggcagcgggaaaaccacgtcgattcttcatctgttagcccataaagatcccaacgaaaaatgggcggtactggttaatgaatttggggaagtcggaattgatggtgctttgctcgccgatagcggcgcattgctgaaagagatccccggcggctgcatgtgctgcgttaatggtttacccatgcaggtagggttgaataccttactgcgtcagggaaaaccagaccgcttgttgatagagccgaccgggctgggccatccgaaacagatcctcgatctgttaaccgcaccagtctatgaaccgtggatagatctgcgcgccaccttgtgcattctcgatccgcgcttgctgctggacgaaaaaagcgccagcaatgaaaacttccgtgaccagctggctgccgcagacatcattgtcgccaataaatccgaccgtacgacgcccgaaagtgagcaagcgctacagcgttggtggcagcaaaatggtggcgatcgacaattaattcacagtgagcatgggaaagttgacggtcatcttctggatttgccgcgtcgcaatttagccgagttgcccgccagcgccgcgcattctcatcagcatgtcgtgaaaaaagggttagcagcgttaagcctgccagagcatcaacgctggcgtcgcagtctgaacagcgggcaaggatatcaggcctgcggctggatattcgacgctgatacggtattcgacaccattggcattctggaatgggcgcgacttgcaccggtggaacgcgtcaaaggcgtgctgcgtattcccgaagggctggtgcgaatcaaccgtcagggcgatgacctgcacattgaaacgcaaaacgttgcgccaccggacagccgtattgagctgatttccagcagcgaagctgactggaatgccttgcagagcgcgctgttgaagcttcgtttagcgactaccgcgtaaggttgcctgcgtttttcagtaagataattagagaaaatatgattaaaaatttgccgcaaatagtgttgttgaatattgtcggcctcgcgctgtttctttcctggtatatccccgttaatcatggattctggttgccgattgatgcggatattttttatttctttaatcagaaactggtcgaaagtaaggcctttttgtggctggttgcattgaccaacaatcgcgccttcgacggttgttcactgctggcgatgggtatgttgatgctgagtttctggctgaaagaaaacgcccctggcagacgacgtatcgtgattattggtctggtcatgctattaactgcagtggtattaaaccagctgggtcaggcattaattcctgtaaaacgggccagcccaacattgacttttaccgatattaaccgcgtcagcgaactgctctctgttcccacgaaagatgcctcacgagatagctttcccggcgatcacggcatgatgctgcttattttttcggcattcatgtggcgttatttcggcaaagttgcaggccttatcgcccttattatttttgtggtttttgcatttcccagagtaatgattggcgcacactggtttactgacatcattgtcggttcgatgaccgtgatattgatcggtttgccctgggtgttgctgacgccattaagtgatcgattaatcaccttttttgacaaatcactaccaggaaaaaacaaacatttccaaaacaaataactcacagtaattaacatcatcagggttatttttatagtgaggataatcctgatgatgcgcaccgtgctttcatctatcgaacgcaaaaatcattctctaagtaaatgaatggattgcatgcgtttcactcaattgtactttaattgaccaaccccgcttattaactttctgtatcactttttcttataaaaaatcatgtaaaaccgctcgccaagaccgcaccaatcgggtaatctcgaactcgttttgcctcggcggtagattatcctcacagcatataattttgtgcgttagtccacagatttggccttaaggaattgtttcaacatgcccaggtaattagtctcgtgtcgcttggcatttttttataacgatatttgtcgttaaggacttcaagggaaaacaaacaacatggtcaaatctcaaccgattttgagatatatcttgcgcgggattcccgcgattgcagtagcggttctgctttctgcatgtagtgcaaataacaccgcaaagaatatgcatcctgagacacgtgcagtgggtagtgaaacatcatcactgcaagcttctcaggatgaatttgaaaacctggttcgtaatgtcgacgtaaaatcgcgaattatggatcagtatgctgactggaaaggcgtacgttatcgtctgggcggcagcactaaaaaaggtatcgattgttctggtttcgtacagcgtacattccgtgagcaatttggcttagaacttccgcgttcgacttacgaacagcaggaaatgggtaaatctgtttcccgcagtaatttgcgtacgggtgatttagttctgttccgtgccggttcaacgggacgccatgtcggtatttatatcggcaacaatcagtttgtccatgcttccaccagcagtggtgttattatttccagcatgaatgaaccgtactggaagaagcgttacaacgaagcacgccgggttctcagccgcagctaataaaccgtttggatgcaatcccttggctatcctgacgagttaactgaaagcactgcttaggcagtgcttttttgttttcattcatcagagaaaatgatgtttccgcgtcttgatccaggctatagtccggtcattgttatcttttaaatgttgtcgtaatttcaggaaattaacggaatcatgttcatacgcgctcccaattttggacgtaagctcctgcttacctgcattgttgcaggcgtaatgattgcgatactggtgagttgccttcagtttttagtggcctggcataagcacgaagtcaaatacgacacactgattaccgacgtacaaaagtatctcgatacctattttgccgacctgaaatccactactgaccggctccagccgctgaccttagatacctgccagcaagctaaccccgaactgaccgcccgcgcagcgtttagcatgaatgtccgaacgtttgtgctggtgaaagataaaaaaacattctgttcatctgcgaccggtgagatggacattccactcaatgaattgattccggcgctcgacattaataaaaacgtcgatatggcgatcttacccggcacgccgatggtgccgaacaaacccgcaatcgtcatctggtatcgcaaccctttgctgaaaaatagcggcgtctttgccgctctgaatctcaacctgacgccttcactcttttatagttcacggcaggaagattacgatggcgtcgccctcattattggcaatactgcgctatctaccttttcttcacgtttgatgaacgttaacgaattaaccgacatgccagtccgtgaaactaaaattgcgggcattcctctgaccgttcggctttatgcagatgactggacatggaacgatgtgtggtacgcatttttactgggcggcatgagtggaactgtcgttggcctgctctgctattacctgatgagcgtacgtatgcgccccggcagagaaatcatgaccgccatcaagcgcgaacaattttacgtggcgtatcaaccggtggtggatacacaagctttgcgagtaacgggcctggaagtactgctacgctggcggcatcctgtcgcgggagaaattcccccggatgccttcattaactttgccgaatcgcaaaagatgattgtgccgctgactcagcacctgtttgagttaattgcccgcgatgccgcagaattagaaaaagtgctgccggtaggcgtcaaatttggtattaacattgcgccggaccatctgcacagcgaaagctttaaagcagatatccagaaactgctcacttccctgcccgcacaccatttccagattgtgctggaaattaccgagcgcgatatgttgaaagagcaagaagccacacaactcttcgcctggctgcactcggtcggcgtagaaattgctattgatgacttcggcaccgggcacagcgcgcttatctatcttgagcgttttacgctcgattatctgaaaattgaccgtggatttatcaacgccatcggtacggaaacgatcacttcccccgtacttgacgcggtgctgacgctggcgaaacgcctcaatatgctgacggttgctgaaggggtcgaaacgccggaacaggcgcgatggctaagcgaacgcggcgttaatttcatgcaaggctactggattagccgcccgttaccgctggacgattttgttcgctggctaaagaaaccgtatacgccgcagtggtaaggtgtgcttacgtcccttattattcatagtgaaagcatgccggattgcggctaatgatgagtaaaaggaaatccgttgcagatgattgtgcgcatactgctgctgtttatcgctctgttcacctttggtgtgcaggcgcaggctatcaaggaaagctatgcctttgccgtgctgggcgaaccccggtacgcgtttaatttcaaccattttgattatgtgaaccccgccgcgccaaaaggtgggcagataacgttgtcagccctcggcaccttcgataatttcaaccgctatgcactgcgcggcaacccgggcgcacgcaccgagcagctgtacgacacgctatttacgacttccgatgacgaaccaggcagttattacccgctgattgctgaaagcgcacgctatgctgacgattattcctgggtggaggtcgctattaatccgcgcgcccgttttcatgatggttcgcccattactgcccgcgatgtagagtttacttttcaaaaatttatgaccgaaggcgtgccgcaatttcgtctggtctacaaaggcaccaccgtcaaagccattgcaccgttaaccgtgcgcattgagttagctaaacccggcaaagaagatatgctgagtctgttttcgctgccggtatttccagaaaagtactggaaggatcacaaacttagcgacccgctcgccacgcctccgcttgccagtggtccgtaccgcgttacgtcctggaaaatggggcaaaatattgtctattcccgtgtgaaagattactgggcagcaaacttaccggtaaaccgtggacgctggaatttcgacaccattcgctacgattattacctcgatgataatgtcgcctttgaagcgtttaaagcaggtgcctttgatttgcgtatggaaaacgacgccaaaaactgggccacgcgttataccggtaaaaatttcgataaaaaatacatcatcaaagatgagcaaaagaacgaatcagcccaggatacgcgttggctggcgtttaatatccaacgtccggtattcagcgatcgccgggtccgggaagctatcactctcgcctttgactttgaatggatgaacaaggcgttgttttacaatgcctggagtcgcacgaacagttattttcagaataccgaatacgcggccagaaattaccccgacgccgcggagctggtgcttctggcaccaatgaaaaaagatctaccgtcagaagtcttcacacaaatctaccagccgccggtatccaaaggcgatggctacgatcgtgacaacctgttaaaagccgacaaacttctcaacgaagcgggctgggtgctgaagggtcagcaacgcgttaatgccacaacgggtcagccactcagctttgaattattgcttcccgcaagcagcaatagtcagtgggtattgccgttccagcacagcctgcaacggctgggtatcaacatggacattcgcaaggtggataactcgcaaatcactaaccgcatgcgcagtcgcgactatgacatgatgccgcgcgtatggcgggcgatgccgtggcccagttccgatttacagatttcctggtcatcggaatatatcaattccacttataatgcccccggcgtgcaaagcccggttatcgactcgctgatcaaccaaattattgccgcgcagggaaataaagaaaaattactgccgttggggcgagcactggatcgcgtattaacgtggaattattacatgctgccaatgtggtacatggcggaagaccgtctcgcctggtgggataaattctcccagccggccgtgcgccccatctatagcctcggtatcgatacctggtggtatgacgtcaataaagcggccaaactgccgtccgccagcaaacagggagagtagatgggcgcttacctgattcgccgtctgttgctggtgatcccaacattatgggcgattatcaccatcaactttttcatcgtgcaaattgcgcctggcggtccggtcgaccaggccatcgccgccattgagtttggtaatgccggagtattacccggcgcaggcggtgaaggtgttcgtgccagccatgcgcaaacgggtgtcggcaatatcagcgacagtaattaccgtggcggacgcggattagatccagaagtgatcgctgagatcactcatcgctacggttttgataagccgatccacgaacgttacttcaaaatgctctgggactacatccgctttgattttggcgatagcctgtttcgcagcgcctcggtgctgacgctgattaaagacagtctgccggtttccatcaccctcggattgtggagcacgctgattatctatctggtgtcgattccgttaggcattcgcaaagctgtttataatgggagccgctttgacgtctggagtagcgcatttatcatcatcggctacgccattccggcctttttgtttgccatcctgctgattgtcttcttcgcgggcggcagctatttcgacctgttccctctacgcggcctggtttccgctaactttgattcgctgccgtggtatcagaaaatcaccgattatctgtggcatatcacgctgccggtgctggcgacagtgattggtggctttgcggcgctgaccatgctgacaaaaaactcattccttgatgaagtgcgcaagcaatacgtggtgaccgcgcgtgcgaaaggggtaagtgaaaaaaatattctctggaaacatgtgttccgcaacgccatgctgctggtgattgccggttttccggcgacgtttatcagcatgttttttaccggctcgctgctgattgaggtgatgttttcactcaatggtctgggcttactgggctacgaagcgaccgtctcgcgcgattatcctgtaatgtttggtaccttgtatattttcaccctgattggcctgctgctgaatattgtcagtgatatcagctatacgctggttgatccgcgtattgattttgagggacgttaatgtcgcgactcagccccgtcaatcaggcccgttgggcgcgttttcgtcataaccgtcgcggctactggtcgttatggattttcctcgtcttgtttggtttgagtttgtgttctgaacttatcgccaacgataaaccgttgctggtgcgttatgacggcagttggtatttcccgttattgaaaaactacagcgaaagcgattttggcggcccgctggcaagtcaggctgattatcaggacccgtggctgaaacaacggctggaaaataacggctgggtactgtgggcaccgattcgctttggtgctaccagtatcaactttgctaccaataagcccttcccttctccaccctcccggcaaaactggctgggaacggatgccaacggcggcgatgtgctggcacgcattctctatggcacgcggatctcggttctgtttggcctgatgctgactctctgttccagcgtgatgggcgtgctggcgggggcgctacaaggctattacggcggtaaagtcgatctctggggacaacgctttattgaagtatggtcggggatgccgacgctgtttttgattattttactttccagcgtcgtacagcctaacttctggtggctgctggcaattactgtcttgtttggctggatgagtctggtcggcgtggtgcgggcggagtttttacgtactcgtaatttcgactacattcgtgcggcacaggcgcttggcgtcagcgatcgcagtatcatcctgcgtcatatgttgcctaatgccatggtcgcgaccctcacctttttaccgtttattttatgtagttcgataaccaccctgacctcgctcgatttcctcggcttcggtctaccgctcggttcaccgtcactcggtgaactgctgttacaagggaaaaataaccttcaggccccgtggcttgggatcaccgccttcttgtcggtggcgatattattgtctttgctgatctttattggtgaagccgtccgcgacgcatttgatcctaataaggcggtgtagcatgacgcaaactctgttagcgattgaaaatttgtcggtgggttttcgccatcagcaaaccgtacgtacagtagtcaatgatgtttcactacagattgaggctggcgaaacgctggcgctggtgggtgagtcaggttcaggcaaaagcgttaccgcgctgtcaattttacgcctgctcccttccccgccggttgaatatctctccggcgatattcgttttcatggcgaatcgctgcttcacgccagcgatcaaacgttgcgcggtgtacgcggtaataagatcgccatgatttttcaggaaccgatggtgtcgttaaatccattgcataccctggaaaaacagctttatgaagtgctttcactccaccgcgggatgcgtcgggaagcggctcgtggcgaaattcttaactgccttgatcgcgttggtatccgccaggcggcaaaacggctgacagattatccgcatcagctctccggcggcgaacggcagcgggtgatgattgcgatggcgctgttaacgcgaccggaattattaattgccgatgaaccgaccaccgcactggacgtctctgtccaggcgcagattttacagctgttgcgcgaactgcaaggcgagctgaatatgggcatgctgtttattactcataacctcagcattgtcagaaaactggcccaccgcgtggcggtaatgcaaaacggtcgctgtgtcgagcaaaattacgccgctacgctatttgcatcacccactcatccttacacacaaaagctactcaacagtgaaccgtcaggcgatccagtgccgttgccagaacctgcctcaacgttgctggatgttgaacagcttcaggttgccttccccattcgcaaagggattttgaagcgcattgtggatcataatgtggtggtgaaaaacatcagttttacgctacgagcgggtgaaacactgggtttagtgggcgagtccggttccgggaaaagtacgacgggactggcgctgctgcgactgattaattctcagggcagcatcatctttgacggtcagccactgcaaaatttaaatcgccgccagctgttacctattcgtcatcgcattcaggtggtatttcaggatccaaactcctcgctcaacccacgactcaacgttttgcagattattgaggaaggcttacgggttcaccagccgacgctttctgccgcacaacgcgaacaacaagtgatagccgtgatgcatgaagtgggattagatcctgaaacacgccaccgttatccggcggagttctctggtggtcagcgacaacgtattgcgattgccagggcattaattcttaagccctcgctgatcatacttgatgaaccgacatcatcactcgacaaaacggtacaggcgcaaatattgacgctattgaaatcattgcaacaaaagcatcaactggcctatttgtttatcagccacgatttgcacgttgtccgcgcgttatgtcatcaggttatcatactgcgacaaggggaagtagtggaacaaggaccgtgcgcgcgcgtgtttgccacaccgcagcaggagtatacgcgtcagctactggcgttgagctgacgcttaaaaaggattgtagtttgaaaagggttcggcaattgccacaccaaaatttttcaatcggcatgttgcagcaaactcgtcctggcgatttacaaacaggcacggctcaccttcacactccagcaccgaacatggaacttcgatgtcgcttaacgcctggcttagtttatacatcaccgaccatgcattatcaccatccgggctaagcaatttaagcgccaccaggctgttgtcaccgcacggtccattttgcggaatcggttcaaccttcgaacctgcgaaaccagcagaccagcgatagttctgcggcagtcgatggacgattgagagttgtaatgaagtcacttattttccccggaagcacattcacttcacaatttgtttacatcaattttaacacatcatcaacaatccgtctttatacagatcgtaaagattgatgcctcgcctgcgtggcctctatggctctgatttaagtaatatctgcgggcgtggtcacgtttgcggggctatatgtacccgtttctgcgatctaactcaacctttttaactacaatgatgtgactttttacataaattgattttacataaaataaacatatatcgggggaatgatagatttgtggttgacatgcatcaacaaaggaagccttttagcttcctcgttgtgcaatagatcaccgttttttcggccgactggcgtacagacagaagagaatggagctggttgcgcagaatgcaattgaccaaatcatcggccatgcagagttaaaggtcgcaagagaaagcaatgcgccaacaattgcccctatgccaaaacggaaggttcctgccagcgaagatgccgttcccgccatatggggaaactcatcaagaatgaccgccatcgcattggatgacaccatcgacacgcagcccacaaacgccgcaacgccaaccaccagcgaccaaaatcccagccccagcagcgcactgatgaccatccacgctgccataataaattgtatccacaaccccgagcggaacatatttaacgcgccaatgcggcggacgaagcggctgttaaagatggtcatcacgaacagaaaaacaatgtttagcgcaaagtaataaccaaagttttccggcgcgacgtggttaatttcaatataaacaaacggtccggcgcttaagaatgagaacatcccggcaaagctgaaaccactggcaagcatgtagctcaggacacgtttatggcggaacagcgccgcaaagttaccaatagtggtacgaatgtgaaatggctgacgacgctccggtggtaaggtttctttaatcaggaagaaaatcattgccgaagccagaatcgccgctaatgccaggatccagaagatgtaatgccagctcagccacaccagcacccagccgccaactatcggtgccatcagcggtgcaatggttgtcaccagcatgacaaacgacatcatccgcgagaactcttctttcgggtaaatatcgcgcatcagggcgttaatgaccacgctggccgcagccgcagccagcccgtggaagaaacgcatcacaatcagctgatcgatggtgtttgccaacgcacacgccaccgcggcggcggcaaacaccagcgtaccgccgagcaccaccggcttacgcccgaagctgtctgccatcggcccgtagattaactgccccaacgcaaagcccagaatataagtactgagggtcatctgcgtactgcccgccggtacgccaaactgcgctgaaattaccggtagcgcgggcagatacatatcaatcgacagcggcatcaacatttattattaattaaggataaaaacaatagcaaacgacgaatgctgtcgggtggtcacaacgggctcctgaaagtcattgaaaagttagacgacgctggcaatttcttcttcagttaacggacgatattcaccgggggctaaatcagcatccagcgtaataccgccaatacgttcacgatgcagctcaaccacgtggttacccacggcggcgaacatgcgtttcacctgatgataacgcccttcgctgatggtcagacgaacctgcgttggggtaatcacttccagcaccgcaggcttagtgagatctttttcgttatgcagctgcacgcctttagcaaattgctctgccgtatcgtcagctacaggtgattccagtgtcaccagataggtcttctcgcaatgatggcgcggagaagtaatgcggtgcgaccactgaccatcatcagtcatcagcaccagaccggtggtatcaatatccaaccgccccgccgcatgcagtttccacgctaccggttcatcaagaaaatagagcaccgttgggtgatcagggtcgtccgtggagcaaacatagccctgaggcttattgagcatgaagtaacgtggaccgtgttgctgcgccagcgggttgccatcgtaagcgacatcatgttcaggaagcagtttgaacgctgcattacggacgatttcgccatcgacggtgacacgattgccgcggatttcacgcccggcaatagcacggctaacgccgagttgctgtgcgataaatttatcaagtcgcatgtgtgtgattttgcctgtaaaaacggaggtcgggcattgacccgaaaatctgaactgttgtctgcccagtatagcggtctaataacatccctcaagggaaaaagatccatggcatactattagcagaataatctacctacgcgagaccatgatttttacacttcgcccatatcagcaagaagccgtggatgccacgctcaaccattttcgtcgtcataaaacccctgccgttatcgtgctgcccaccggcgcaggtaaaagcctggtgatagcggaactggcacggctggctcgtggtcgcgtgctggtgctggcacacgttaaagaactggtggcgcaaaaccatgcaaagtatcaggcgctggggctggaagccgatatttttgccgccgggctaaagcgcaaagagagccacggtaaagtggtatttggcagcgtgcagtctgtcgcccgtaatcttgatgcctttcagggtgaattttcgctgttgattgtcgatgaatgtcaccgtattggtgacgatgaagagagccagtatcagcaaatcctcactcacctgacaaaagtgaatccccacttacgcctgctggggctgactgccacgccttttcgattgggcaaaggctggatctaccagtttcattatcacggcatggtacgcggcgatgagaaagcccttttccgtgactgcatttatgagctgccgctgcgttatatgattaaacacggctatctgacgccgccagaacgactggatatgccagtagtgcaatacgatttcagccgcttgcaggcacagagtaacgggctgttcagcgaagccgatctcaaccgtgagctgaaaaaacaacaacgtattaccccgcacatcatcagccagattatggagtttgctgcaacgcgcaaaggggtgatgatttttgccgcgacggttgaacacgcaaaagagattgtgggattactgcctgccgaagatgcagcactgattactggcgacacccccggcgctgagcgcgatgtgttaattgaaaattttaaagcccagcgttttcgctatctggtcaacgtcgcggtactgaccaccggatttgacgccccgcacgtcgatcttatcgccattctgcgccctaccgaatcagtgagtctttaccaacaaattgtcgggcgcggtctgcgtctcgctccgggcaagactgattgcttaattcttgattatgcgggtaatcctcacgatctctacgcgccggaagttggtacaccaaaaggcaaaagtgacaacgttccggtacaggttttctgccctgcctgcggttttgccaacaccttttgggggaaaacgaccgccgacgggacattgattgaacactttggtcgtcgctgtcagggatggtttgaagatgacgacggtcatcgcgaacaatgtgacttccgtttccgttttaaaaattgcccgcaatgtaacgcggaaaacgatattgccgcccgccgctgccgcgaatgtgacaccgtactggttgatccggacgatatgttaaaagcggcgctacgactgaaagacgcgctggtattacgctgtagcggcatgtctttgcaacatgggcacgacgagaaaggcgaatggttgaaaatcacctattacgatgaagacggcgcggatgtgagtgagcgtttccgtctgcaaacacctgcccagcgtaccgccttcgagcagctttttatccgcccgcatacgcgcacaccgggcatcccgctgcgctggatcaccgccgccgatatcctcgcccagcaagccttattgcgacacccggattttgtcgtcgcccgcatgaaaggccagtactggcaggtgcgtgaaaaagtgttcgattacgaaggtcgttttcgtctggcgcacgaattacgcggttaatggtagttttgattgatgtataaggcgattgagtatagaatctcgcccgcttttgcatacgcaaagcagatcacttacctgttgctgggtcgcctgtagcaggattaatttaagagagaaagaaatgtttactatcaacgcagaagtacgtaaagagcagggtaagggtgcgagccgccgcctgcgtgccgctaacaagttcccggcaatcatctacggtggcaaagaagcgccgctggctatcgagctggatcacgacaaagtcatgaacatgcaagctaaagctgaattctacagcgaagttctgaccatcgttgttgacggtaaagaaatcaaagttaaagctcaggacgtacagcgtcacccgtacaaaccgaagctgcagcacatcgacttcgttcgcgcttaattgctgaataagttgtaaaaaaccccgctccggcggggttttttgtatctgcagattatgcctgattacggtattgctattttttgcaggccagataaggcgttcacgccgcatctggcattcagaacacaaaaccgattaattgccgccagacgtccggcgctgcaattggtcgcgcaaattcggcggcgtgcctttaatggtcaaggtatcggttgctggatcccagaagatgcgttcacctaacagcatcgcatcaaagttaatagtcaagccaccgccgctaccggcaaacttcgtcaactgacgcagtgtgctacggtctgccgggaagctctcttccagttcgtagcctttttcagccgcaaactccgtgaagctcacttcgcttacgcctgccagctctttcgacagcgatttcagttcgatctcttcgcctgcctgcagctgctcattacagtagctataaacctgctggcgcacgttctgtcgctctgctttatccagttgtgcttcggcagtgaaatcatcaaccgcttgcaacagcccacggttttgcgctttcgcgtttaacccttcgctggccccgaggaaatccataaagaaatccgccactttgcgccctactcgccctttcaggaaagtgagatagcgggtggactctggattggtttcccattcggttaaatcgatacgcgcaacaatatccgcatgattgatatcaagataatgggttgggttgatgtcgagattttcgttaacgcgcatactgctcaggttgctcagaactgccaccagcaaatactccaccgccagatagcgatagtggcaaaacagcacgaatccaccgtcagcaaaaggatatttcgctaattcgtcacgcaggcggccggttgccgcgcggctaaatgccaggaagtcctcttcgccctgacgctgtaagcgcagcgtctgcgccagttcactctcttcgctaaacaagccgtaagctttatttttggcgctatagacccgatgcagttctgccaccatctcaacgacggtttctgtcggttccagcaatgaatcgcgcaacaccagctcaaggttctgctcatcacgcttgataagctggtgcagagcaatctggttgatatccagactcatgataaactctcctttaagaccgggcggtattcaaccaccgccggttaagcgacgcaataaaagatggcggtcattttacagaaggcagcgtaacgagaatgatttaacgcataaaaaagcagaaaaaaaaccgttgctacggtaatatgttgccctttcatcaactaactgatttcgatttatgccacaaatttcccgctacagtgatgaacaggttgaacaattgctcgcagagctgctcaacgtactggaaaaacataaggctccgaccgacctttccctgatggtgttaggcaacatggtcactaaccttatcaacaccagcattgccccggcccaacgccaggcaattgccaactcttttgcccgcgccttacagtcctctatcaacgaagacaaagcgcactaagggaaacagataacaggttatggtaactcatcgtcagcgctaccgtgaaaaagtctcccagatggtcagttgggggcactggtttgcactgttcaatattctgctttcgctcgtcattggcagccgttacctgtttatcgccgactggccgacaacgcttgctggtcgcatttattcctacgtaagcattatcggccatttcagcttcctggtgttcgccacctacttgctgatcctcttcccgctgacctttatcgtcggctcccagaggctgatgaggtttttgtccgtcattctggcaacggcgggaatgacgctattactgatcgatagcgaagtctttactcgtttccatctccatcttaatcccatcgtctggcaactggttatcaacccagacgaaaatgagatggcgcgcgactggcagctgatgttcatcagcgtgccggttattttattgcttgaactggtgtttgcgacgtggagctggcaaaagctgcgcagcctgacgcgtcgtcgacgcttcgcgcgcccgctggccgcattcttatttatcgcctttatcgcctcgcatgtggtgtatatctgggccgatgccaacttctatcgcccgatcaccatgcagcgcgctaacctgccgctttcgtacccgatgacggcgcgacgttttcttgagaagcatggtctgcttgatgcgcaggagtatcaacgccgtcttattgagcaaggtaatccagacgccgtttccgttcagtatccgttaagcgaactgcgctatcgcgatatgggcaccgggcagaatgtgctgttgattactgtcgatggcctgaactactcacgcttcgagaagcagatgcctgcgctggcaggttttgctgagcaaaatatttcgttcacgcgccatatgagctccggcaacactacagacaacggcatctttggcctgttctatggcatctcgccgagctatatggacggcattctgtcgacccgtacgcctgcggcattaattactgcgcttaatcagcaaggctatcagctggggttattctcatcagatggctttaccagcccgctgtatcgccaggcattgttgtcagatttctcgatgccgagcgtacgcacccaatccgacgagcagaccgccacgcagtggatcaactggctgggacgctacgcacaagaagataaccgctggttctcgtgggtttctttcaatggtactaacattgacgacagcaatcagcaggcatttgcacggaaatatagccgggcggcaggcaatgtcgatgaccagatcaaccgcgtgctcaatgcactgcgtgattctggcaaactggacaatacggtggtgattatcactgccggtcggggtattccactgagcgaagaggaagaaacctttgactggtcccacggtcatctgcaggtgccattagtgattcactggccaggcacgccggcgcagcgtattaatgctctgactgatcataccgatctgatgacgacgctgatgcaacgcctgctacatgtcagcacacctgccagcgaatattcgcaaggtcaggatttgttcaaccctcaacgccgtcattactgggttaccgcagcggataacgatacgctggcaattaccaccccgaaaaagacgctggtactgaacaataacggtaaataccgcacttacaacttacgtggtgaaagagtgaaagatgaaaaaccacagttaagtttgttattgcaagtgctgacagacgagaagcgttttatcgctaactgattaattataaatcagttagcgaaatatcttacttgcaatcggtgtggaaaacggtagtattagcagccacgagtcggcacgtagcgcagcctggtagcgcaccgtcatggggtgtcgggggtcggaggttcaaatcctctcgtgccgaccaaaaatcccaagaaaaaaccaacccttacggttggtttttttatatctgcaattaattcgataaacagaccgtgacacatcacagcctgtttattttctgttatcagaacgtccagaccacacccgcctgagtattccacggcgattctacccctgcgccattgccatagctgactgacaaatgaccgcttaacgtcggggtaaacgatgaccttataccagcctgataaacgccactggttccagccacatcattattaaatttgccatcgtcattaactttcacctggttagaatcggcgtattcctgacgcacggccgctttcagccagggttccagcgtcgtaccgttttgcaggtccatgtgatagcttaccgccgttcccgcttcagcgcgtaatatccgggtatttcccacatccgcgcgcatgccgtttgataacgtgtagtcctgaccatctgtggtaaagccggtaaaggccagatagggtctaacactccacaatccgtcaacccaacggaacccgctctcaacatgagcacccgcgccgttactattgtaatcgccaaacgctgttgccccattactcatcttgccatggatggtgttggcaaaacggtcaactttcaccaccccatcaacataggcaccgttctgatgctcccaaccggcataagcccccagggtatagctatcgatattacctttgccgccgcgatcaaaaccaatatcagaatgagagtaaccaaagatcaagccgcgaattgtactgctttcttcacgggagaaacggctatcgataccgagcgtcaggcccgtcaatgtttgctcaaaaccagctcccgcatcagtggtcacgttgttgcgggtgttaattgccgaactccacatcgccgtatcgtaactaacgccttttacgctaccaagacgctcacgcacggtgtccagttctgcatcaaataccagcggttgtgcggccgccatattcagcacatcagtggttgaaggggtaatttgcgcgcgattctctgccagactccagctatggttgccattatccagcaaggtatattcatacgtaccgatatcaacaacgcctccggcattgcccaacgtaaatgcagcatcaccgccgcccgttgttaccagtgtaaggctatctcctgctgccgggctggcaccggtgtccgtcacgaatattttgaaatcacctgttgcctgaccggtgacgttgagctgatcgctctgatgattagccatatcggtacgcatataaaaattgccgtttcccgacagggtattggtggtcaacgtaatgaaattttccgcacttgccgtcactgatgaacgagtcactggctcatccatcataatcacatttgcgtcagacatcgcaaggttggctaagttgaggagggtgttttggttcgtcgtagtgatatcggcaatgatggtccatacgctattttcgagcgaaacgtccgctttgctggtatccacggcaccatgcgttctaaaagaagcgccctcagaaaccactaccttacccaccaacattgcgggtgcataatttatttgcggcttcatgacctcaagaatgccatcattccctctgactgaaacgttaaccattgtgccagcccagacgttagcgcggccattgttgataaccatattttcagagatggcttttgaggaatacgtgatacttccattctgatatgatcgaccgagatcatataccgcatttgcctgcactttcgtaccagtatcctttcccagcgattgcatagtggcatgcttatcaaggatagtatcaatggcctgcgtgtcctccataacaatgagcccggaaccatcatccagttcataattttttgacacaccatcttttatactaaattggcctttactgtttggaccactcacttccagcgcattcgttgagacaattaattttccgcctgcttttttatcaacgccagttacagtcccgccatccataacctccagtaagccgccactatctacagtggtattataagcgaagtcattttcttcaactcgcaaacttccgccgttttccaacaacatattattagcaataccattcttgatatcgaactgaccgagacggtttgttccgaatacctccatggcccgcgtggttgttttaatagcaccgcctgctttctgatctaccgcaaatgcaaatcccccctctttaacctccagtagtcctcccttttcgatagcgacaaagacggcccccccatctttttcaacgattaagcgcccgcctttaatcgtggtatcattcgctgcgccataaacctgtagcacaccattattgagcgtagtctggtttgccgcgccacccatttgaacaatttgataaccgtcatttaatactgagtattctgcggcgccattcatttcaatgtactgataccctccgttaatttcagtattattacttacaccaaattcttttatatgctgttctccgccaggattgattttcgtattattggcggtcccataaaccagctggatatctttttccaggacaacaccatcaactgtctcaccatactcaacagttgatgccaatgctatgggtgaatataaggaaggtgcgaataagcggggaaattcttctcggctgactcagtcatttcatttcttcatgtttgagccgattttttctcccgtaaatgccttgaatcagcctatttagaccgtttcttcgccatttaaggcgttatccccagtttttagtgagatctctcccactgacgtatcatttggtccgcccgaaacaggttggccagcgtgaataacatcgccagttggttatcgtttttcagcaaccccttgtatctggctttcacgaagccgaactgtcgcttgatgatgcgaaatgggtgctccaccctggcccggatgctggctttcatgtattcgatgttgatggccgttttgttcttgcgtggatgctgtttcaaggttcttaccttgccggggcgctcggcgatcagccagtccacatccacctcggccagctcctcgcgctgtggcgccccttggtagccggcatcggctgagacaaattgctcctctccatgcagcagattacccagctgattgaggtcatgctcgttggccgcggtggtgaccaggctgtgggtcaggccactcttggcatcgacaccaatgtgggccttcatgccaaagtgccactgattgcctttcttggtctgatgcatctccggatcgcgttgctgctctttgttcttggtcgagctgggtgcctcaatgatggtggcatcgaccaaggtgccttgagtcatcatgacgcctgcttcggccagccagcgattgatggtcttgaacaattggcgggccagttgatgctgctccagcaggtggcggaaattcatgatggtggtgcggtccggcaaggcgctatccagggataaccgggcaaacagacgcatggaggcgatttcgtacagagcatcttccatcgcgccatcgctcaggttgtaccaatgctgcatgcagtgaatgcgtagcatggtttccagcggataaggtcgccggccattaccagccttggggtaaaacggctcgatgacttccaccatgttttgccatggcagaatctgctccatgcgggacaagaaaatctcttttctggtctgacggcgcttactgctgaattcactgtcggcgaaggtaagttgatgactcatgatgaaccctgttctatggctccagatgacaaacatgatctcatatcagggacttgttcgcaccttccataacgctgtagccaccagaacagatattgcggaacgacaaagagaaacagaaccagattgatgcattgagctttcatcctatgaaattaattgctgttaaaagcattgggtacagaaaatacccatagctccatacccggagtcagtttttaaaaactgtttaaagaaatgcacaagtattgtgattgattttttagttgtttttcttgatgagaagctgatgcaaaattccgtctttataatgaaaatgatgccaaagcgaacgacaaggttgtagttttcactacatgtccatacataaaatggggtaacattcacgcgcctggtagcgttaccaacgctacgctcaaacataatgattctaataaaacctcaggagactactatgcctgaagcaacaccttttcaggtgatgattgtggatgatcatccacttatgcgacgcggtgttcgtcagttactggagcttgatcctggctctgaagtggtcgccgaagcgggcgacggcgcgagcgctatcgatctggcgaatagactggatatcgacgtgatcttgctggatctcaatatgaaaggtatgagtggcctggatactctcaatgccttgcgcagggatggcgttaccgcgcaaattattatcctgaccgtatccgatgcctccagcgatgtctttgcgctgatagacgcaggcgcagacggttatctgttgaaagacagcgacccggaagtattgctggaagcgattcgtgccggagcgaaaggcagcaaagtctttagcgaacgcgtcaatcagtacttacgtgaacgtgaaatgtttggcgcggaagaagatcccttcagcgtgctgacggagcgcgagctggatgttctgcacgagctggcacaggggctgtcaaataaacagattgcctcggtgttgaatatttccgagcagacagtaaaagtacatattcgcaatctgctgcgtaaactcaatgtccgctcacgcgtggcggccaccattctgttcctgcaacaacgcggggcacaataaaaatagcccgatggatttatcatcgggctgagatttatgacaaacgcaaaactgcctgatgcgctacgcttatcaggcctacgtggatcgatcaatttattgaatttacacaattttgtaggccggataaggcgttcacgccgcatccggcataaactaagcgcactttgtcaacagtctagcccgatggcatcaccatcgggcctctttttatttactctcctgcggcgacaaatgttgcatcgcctgcgcgatactacgttcaatcaccgcacggcgagtatcgttggcaggtaagagtttcaacatcatctcccacgcggcaacggcttcgccaaatcgctgctgctcaaaggcattaaacgcatacatgcttagcacacggatattgctatggtccgttctcaccagctgacgtagcagttcaccgccgaggcggttgtcgttgggatcagatgaacgagtcaacgcttcagcgtatcccagtgcagcatcactgtttttcggatcgaggcgatacgcagtggcgtatgcatcggtggcgatactggcgttacccagcgccatgccaacgcggcccaacataatccagccttctatatctcccggatttttttgcagttgagtacgcatccccagcgcaagacgcgacatctcttcttcgttgagcggatcggctttcggatccagcgccctgtccagcaacgccggagcctgtgccgtggcctgctgccagattttcacctgctgataattgccagtctggtagtagctgacgccagccacaattaacgccaccacaatacccggcagataaacaacatatccggcacgcttaccttccggcacgctttgttcaggaaacgcttccggcaccacgcgtacccgacgccgcgagcgggcgtatatgacccaaccgccaatgccaatagccactactggcagcacccacagcagcacggtcagcggcgttaacggcggatcgtaagtgacgaagttgccgtaacgcgccaccatataatcgacaatctcttttttacttttaccttcctgcatcagttcatacactttctgacgcaggtcggtggcaatcatcgagttggaatcggcaatgctgttgttctggcatttcgggcagcgcagttcttcagtgagctgacggaactgttgttcctgtgcttcatctttaaactgcaacacatcgatggtcgccagcgctgagccggagatcatcagcatcagcacgcccaataaaaacctcattgtgcggcctccttactgtatttctcccacagcggcttgatctcttcttcccagacgcgaggattcagatcgcccgcatggcgatagcgaatgatgccgttgccgtcaataagaaacgtttctggcgcgccatagacaccgagatccagccctaacatgccatcgccatcaaacaggcttagcgcgtaaggattgcccagctctttcagccagctgattgccttctggcgatcgtctttatagttcatgccgaccacgcggatgccctgcgcagaaagctgattcagatattgatgttccgcacggcaggtcggacaccaggtcgcccagacgttaagcagtactggtttgccctgagtcagcacatccgcctgataaaactgccccggattgtccagtgattcgagacgaaacttcggcacaggcttgccaatgagcgccgattccagattggtcggatcatccccttcggcattacgcgccagctgccacagcagcgccgcggcaatcgccaggaagataatcaacggaattaacaatactttgcgcttcatacggcctccggcgcagttttttgcggactcacgcgcttacgatagcgaggatcaaacagacacagcagtccgcccaacgccatcatcagcccgcccgcccaaatccagcgaacaaatggtttgtagtaaagacgcacggcccacgcgccgttttccagctcttcaccgagggccgcgtacaggtcacgcgtgatgccgccgtcaattgccgcttcggtcatcatcgacccggcagtgttgtaataacgtttttccgcatacagcaccgtttccggcttgccatcgcgcgttacgccgatagtcgccacaccgccacgccagttcgggccagtcacctctttgacatcacggaaggtgaagcgatattcatgaatatcgacgctatcgccggacttcatgcgcacatcacgctcaacgctatagttctggctaaaggcaatgccaacaattgtcactgccagcccaaggtgagccgccaccatcccccaataactgaaggtggttttcgtgccgcgtgaaatacgtagcgcagcttccgcaattgccagcaccgcaatccagcaggccattgccaggccgagcaccgtcatcgccacaactttgctttcgaacagccacggcaacagcagcgacagcaccagcgtagagatgaaggcgataatcaataaattgcggatcttacgcgggcgatcccgcccccagcgcaccagaggaccgacaccaagcagtagcgcaaacggcaccatcagccaggtaaacatggtgttgaagaacggttcgccaatcgaaatactgcccagtcccagttgcttatgcaccaacggcagcagcgtccccagcaacaccaccagcatcgcagcgaccagcaaaacattgttcgctaacagcaaagattcccgcgaccacagcgcattgtttacgcgtgagcgaactttgtgtccacgcgcggcaaacagcagcagcgaaccgccaatcaccagcaccataaaggcgaggataaacataccgcgcgccggatcagacgcaaacgcgtgtaccgataccagcacgccggaacgcacgaggaaagtccccaacagacacaacgagaaggcactgattgccagcagtaatgtccacgctttgaagctggcgcgttgttcagtgaccgccagtgagtgcatcagcgcagtccccaccagccacggcataaacgaggcgttttctaccggatcccagaaccaccagccaccccagccgagttcgtaataggcccatgcggaaccgagcacgatgccgagcgtcaggaagatccacgctgccagcgtccacggacgagtaaaacgcgcataagtgctgtccagacgcccgctcagcaaagaagcaatggcaaaagcaaacgccaccgagaaacccacgtaccccatataaagcagaggcggatggaagatcagccccggatcctgcaatagcgggttaagatcgcgaccttcaatcgggaagttcggcaacgtgcgagagaacgggttagaggtaaagagaatgaacagcaaaaagccgacactgaccatccccattatcgccagtacacgggccacaatatccagcggaatacgctgactaaaaatcgccaccgcaaaggtccagccgctcatcagcagcacccacagcagtagcgagccttcatgcgcgccccaggtagccgccacgcgataccacaccggaagctgggtattggagttgctggcaacataggtgacggtgaagtcgttgaccacgaaagcattgaccagcaccagaaatgcgccagccacagacataaacagcagccaggcaaacaagcgggaagacgccatcatgcgcgcatctccgcgcgccacgccccatagcggatacacggacagcagcagcgcaattcccagcgccaggcacagcagtccgttaccaatttctggcatcatgatgctgggtccttataaacactcgccgggcgacggtggttagcttccatcgctttctcaacttctggcggcgtatagttttcatcgtgtttcgccagcacttctttcgcgaggatatgattgcctttttccagttcgccctgcaccacaacgccctgcccttcacggaacagatccggcaaaatgccttcgtaagagacatccactgagccttcagcatcgtaaatggtgaaggtcactttcagcgaattgggatcgcgctgcacactacccggcatcaccatcccgccaacgcgcagacgctgaccgacttccggcatttgctgagtttcacgcttgccgtagagaatttcccccggcgtataaaagagatcgatattcgagcgcagcgcatatagcaccagaccgatagtcagcgccagccctgccaacacggcacaggcaatccacaagcggtttttacggcgaatattcatgcagcctcctgctgttgcgcagcacgtaaacgcgcctcacgcgcccgctgttgcgccacgccacgcagaattgcgcgatgttgcatcaccgagtgcacgaccaaaaccaccagcggaataacggtcatcaccaccgccagccagacaaaaaaggcgtaaccgcccattgcgaaaaattcattccaggaagcaaatgcaggggtcatttacggcctcttttcagtatcagttcactcacccacggacggcgtttttccatcagcaaaatcaaattacgcatccgcatcagcgtcagcgtggcagacaggagcaggaagccaaaaatcgaccagcgcagcggcgaacgcatcgccggatcgatactttgctgcatccgcgttgatccctgatgcagggtgttccaccactccacggagtaatgaataatcggcagattcaccacgccaatcagcaccaggatacctgccgcacggcccgccagacggcggtcgtcgaaggcgtgccacagggcaatcacacccacatacaaaaacagcagcaccagttcagaagtcagacgtgcatcccatacccaccaggtgccccacatcggttttccccatgcagagccggtaaccagggcaataaaggtaaacacggcaccaatgggggccatcgccgccaccgccaggttggccattttcatctgccagacaaggccaataaacgctgccactgccattgatgcataaatgcccatcgaccagatcgccgcaggcacatgcaggtagataatgcggtagctatttccctgctgataatcagccggagcaaagccgaatccccagatccagccgacggtaagcacgaccacactggcaattgccagccacggtataaaccagccacagatttgatacagccgtggtgggatcgccagttgatgcagtgttttccacatagtttcgataccagactcgaacaaaaatcagtaatccagcgttattgaatgctgattcgtaacgctgccgccgtcgcaaaaggacttaatgtcgcggtgcctgccagcaacgcgcctaaaattgccagatacccgtcaacgggcaaatgcatagaagccgcgtccatcgcggcggtggcaaagatgagtaatgggatagtcagcggtaacaccagtatgctgagcagcacaccaccgcgcttaagtcccactgtcagcgccacgcccggtgcaccgagaaagccaagcgtaggcgttcccagcagcagcgtcagcgccatcacttgccagccataaacatccattcccagtagcattgctaccagtggcgaaaggatgagtaacggcagaccggttaccatccagtgcgccatcaccttcgccagcacaacggcgggcaagggtaacggcaacaacatcaattgttcaagactgccgtcctgcaaatcgtcacggaacagtcgttccagcgccagcaaggatgaaagcagcgcagcaacccagataatgcccggtgcaatacgcgccagcagttgcggctccggaccgatactgagcggaaaaagggtaattacaatcaggaagaaccacagcgggttggcgatttcggcgctatggcgaaacgctacacgcagctcaagacggaaaatgcgccagaacatcatgcggccctcgtttgcgtcagtgaaatgcggcgaattttactttcagcaacgttgagcggctggtgggtagtcagaatcacaatccccccctgctccgtatgctgcgccatacgctgggtcagacgatcgacaccgttaacgtcaatcgcggtaaaaggctcgtcgaggatccataacgtggcacgggtcagccacagacgcgctaaagcgacgcggcgttgttgcccggccgagagctgatttacaggaatatcttcgaatccggcaagcccggcctgcgccagggcttccagacattgtgcggtatcgccatcgcgatgataaaagtgcagattttctaacgccgtcagccgggttttgatccccggctgatggcctatccataacaggttttgatggtagctgtcgcgtacctgatgcaagggctgcccttgccagagaacctcgcctgcgtcagggcgagacaaccccgtcagcaaacggagaagcgttgtcttccccgcgccgttgctaccggtgatttgtacccactctcctgcgttcagcgtaaatgacaagccactaaataaggttcgttcatcccgctcacaaagtaactctctggcttcaagcatacccacgcaataaccctgttaaaaacctggctcgacttcacgcatatcgggcagcttgtgcgctatccctttatggcaatcaatacaggtttgcccatctttcaccgcctggtcatgcatcttcgcggcaaccgatttctgggcggttgtatccatatactcgaagttgtgacagttacggcactcctgcgagttattgtccttcatgcgccgccactcattctgtgccatcgtcagacgatgagcttcaaatttctgcggcgtgtcaataacgccaaaaattttaccatacagctctttacttgctttgagcttgcgtatcatcttcggcacaaactcgtgcggaacgtgacaatccggacaggtcgcacggacgccgctacggttgttgtagtgcacggaatccatgtattcctgatacaccgtgttgcgcatttcgtggcagctaatgcagaactcttcggtattggctttttccatcccggtgttaaagccaccccagaagacgatgccgccaacaaaaccgatcaacagcagcgtccccagcgccagacggctgggggtacgccaccatttccacaggcgcttaatcagaccaggcttacggtcagaatttcccataataacctcttatttcccgtaaccttttgatggggtaaaggtattccccacgattggcgcggtatcggcctgcggtacgtgacattgcagacagaaataacgacgcggagccacttccgcgcccactttgccgtcgctgtccataaagtgagtaggactgatacgcggcgcgccagtggtgcgatagctttcgacaccgtggcactgcaagcagcgattggtattggtcgttacctgataaccttcaacgctatgcgggatcattggcggctgattcacatagttcagcggcatccgatcctgctcttttggcatccgaatggccccttcctgtgtcccggatacttccggcgactggctaaaatcgacgccattagccgcccaaaccgcgccgcttaccaccagggccagcatcgccgtccattgacacagcgctttcttcaggtcatggcttttcatgatttcgctcccgaactccatcgtgtagttattgtaaatacatcctcagaacagacatccacgcagcgaccgcacgtcatgcaatcgcggctggtgacctgcaccgggctttgttcatccagcaccggggcacgtagcacatgcggttccgggcaaacatgaaaacaatccatacagcggttacatttctgccgatcggtggccgcaacggtaatcacacctttgctacccagcacgccatacagcgcgccaaccggacaaatgtgcccgcaccagccgtgttcaacgaccagtagatcaaataaaaacagcgcgagaataagcagcgcgccgctgccgaagcccattaccaggctacgccccatcagagaaacggggttgatccattcccaaatgagcgtgccagttaaggctgatcccaccagaatgaccaccaacagcacgtagcgaatgtggcgagggatcgtcgcagactgattgaggtcaaagcgcctgcgtaaccagttcgctaagtcggtaatcgggttcagcgggcagacccagctgcaaaataatcgctttcccgccagggcgtagagcacggtgataatcaccgcaccggtcaacgccaccgtggcaggcagatgaccactggcaagactttgcagcgtcatcagcggatcggtcagcggaacggtgtcgaataacaggctactgctgtagttgccgtgcaagatccacacaccaaaccatggaccgctcaaaaacatccccagcacgaagaactgacaaaggcgacgtaacaccagccaacggtgactgcgccaccagccttttttctccagcgcctcgcgcccggcgtcacgtttacgatttgccattgttcccctccagccagccgaagcggtaatggtgacctaactcccctttcgccagtgacagcggtaacaccttgattgccggttgttccagcacgcatactttttcgcacttaccgcaaccggtacaggcgtcgctgtgaaccgtcggcagaaagcgggcgtgcttaccggtacgcgtgttgcgctccagctccagggtgatggcctcatcaattttcgggcattcgcgataacaaacatcgcagcgcagcccctgaaagttgagacagttttcctggtccaccagtaccgccagccccatccgcgcgtcgtcgatcgattcaatctcacgatccagcgcaccgcttgggcacactttggcgcacggaatgtcctcacacatttcgcaaggaatatcccgtgcgacaaaatatggcgtgcccgccgacagaccagaggccagcgtcgccagttttaaggtgtcgtaagggcaagcctgaacacactgaccgcaacgcacacaggcactggcaaaggcgttctcgtttatggctccgggcgggcgcaaccgcacgccagatgcgcgtgcggtttgctgttgtaaccccagcgccacacccacggcagccagcccgcctgctgtgcgaacgacatcgcgcagaaagcggcggcgaccattttgaggtttcgctgaccgggacataatggcttacaccttctccagtttgaccgcgcacttcttgaagtccgtctctttcgagagcggatcggtcgcatccagcgtcagtttgttaaccaactgtgcggcgtcgaagaacggcatgtacaccaggccctgtggcggacggttacgaccgcgcgtttcaacaatcgagatcacttcgccacggcgagaaaccactttcactttgtcgccacggcgcagatcgcgcgctttcgcatccagcgggtgaataaacaggaccgcttccgggaaggcgcggtgcagttctggtacacggcgagtcatactgccggtgtgccagtgctccagaacgcgtccggtagagagccacaggtcgtactcttcatccggtgcttccgccgccggttcgaatggcagtgcgaagatcaccgctttgccatccggtttaccgtagaacttatagccttcgcccgctttcacgtacgggtcgttaccttcgctgtaacgccactgcgtttctttaccgttcaccaccggccagcgcagaccgcgcgctttgtggtagtcatcgaacggtgccagatcgtgaccgtgaccgcgaccaaaccatgcgtactcttcgaacagccctttttgcagatagaagcccagctcgcgggattcatcgttcagctgatcttccgccagttcggataccgggaatttgctcacttccggtgtggcatacagcacttcgtacagcgttttgccacgcagttccggtttcttcgccagcagatcttccggccatacttcttcagttttgaagcggcgggagaactggactaactgccagagatccgatttcgcttcgcccggtgcctgtacctgttgacgccagaactgagtacggcgttcggcgttaccgtaagcgccctctttctctacccacattgcggtcggcaggatcaagtcggcggccagcgcactgactgtcggatacggatcggagacgatgatgaagttgcgcggatcgcgccagcccggcatacgctcttcattgatgttcggcccggcctgcatgttgttggtacacatggtccagtaaacattcagtttgccgtctttcagcgcacggtcttgtgccaccgcgtgcagaccgattttcgccggaatggtgccgctcgggatattccacttcttctcgcagatatcacggtgtttctcgttggtcaccaccatgtccgcaggcagacggtgagcaaaggtgcccacttcacgcgcagtaccacacgcagaaggttgcccggtcagggagaacggaccgcaacccggctgggaaattttgccggtcagcaggtgcaggttgtagaccaggttgttagcccacacgccacgagtatgctggttgaagcccatcgtccagtaggagatgactttcttgttcggatcggcatacagctgcgccagttgttctaactggtctttcggcacgccggtcatttcggcagttttttccagcgtatactcggcaacgaaggctttgtaatcttcaaagctcatcggttcggaggcgtcagaacccggattcttcgctgctttttccagcggatgggtcggacgtaaaccgtagccgatgtccgtcgcccctttgcgcaggttaacgtgcttgctgaagaagtcctgatttatcgcattgttttgaatgatatagttggcgatgtagttcaggatcaccaggtcagattgcggcgtaaagatgatgccgttatccgccagctcgaagctacgatgctggtaggtagaaagcaccgccacggtgacgttctggttagagagacgacggttagtgatgcgcgaccagaggatcgggtgcatttccgccatgtttgcgccccacagcacaaacgcgtcagcctgctcgatgtcgtcatagcagcccatcggctcatccataccaaaggtacgcataaagccaactactgccgacgccatacagtgacgcgcgttcgggtcgatgttgttcgaacggaagcccgctttaaacagcttggacgcggcataaccttcccagatagtccactgaccagaaccgaacataccgatcgattccggccctttttctttcagggcggttttgaatttctcttccatcacatcgaaggcctgatcccaggtgattggggtaaattcgccttctttgtcatatttaccgtttttcatacgcagcagcggctgcgtcaaacggtctttaccgtacatgattttgggcaggaaatagcccttaatgcagttcaggccacggttaaccggtgcgtccgggtcgccctgacaggccaccacacgtccctgctgcgttccgaccagaacgccgcaaccagtaccgcagaaacggcacggcgctttatcccatttgatggcttcctgctgaccaacaacggcgcgggcaacgcccggcacgctgagaccggcagccgccgcagcggccgcaacggcgttagctttcataaagctacgacgactgagtttcatggtgtttcctcaccttgctcttcctgctggtgataaaccagcgacaccgccagcacgccctctacgttgcgtactgactcaatggtttggatcagcgtttcgctgtcttctgcttccaccaccacaatcaactgaccgctcggcgcgtcgctgacagcaacttcacagccgggaaaggcgttcagttgggtgctgatgtctgaaattcgttcgcttttggcctgcacgaccaggctgcaaacttgccagttagtgtgcatggagatactccgcagttatggctgataccggacagctggctgcacatgctccacatccgttgcaaagttggctattaagttgcggctggtagatcccggagagcgtcgggcgaaagataattgccattggctcacagctatcctgacagcggcggcattcaactgactgatacgccaggcacgcgtccccgatggtgaactgcaaatcccaggccctggtgtggcgcggagaaaatagcgattcggggcaagcctgcgcgcaggcgtaacagaagctgcactcgttatttttgaaattaacgctcggatagccgcccgcgccgcgttgcagaatgttgttttcacaagcattaatacaggcgtcgcagcgggtgcaatgggtcagaaaatgagattcatcaccggaccagggcggacggataccgttactggctttgcgccagcgaccagtgagtatgccccgacgggatgcatcaatcttcacattgaccttccatcattaacgcgctctgaaaattgagagcgaccaaataaaccgcataattaataagccatttttatagccgctaagatattaaaggatgtgtcaaagatgcataccccgatcggggtaaaacctgtagcaggatcaaaagagtggcgggaagcgtggcaaaaacgggcttttgctcacatttcaaatggttataaatatatttatatagcgattgattcaccagagatatttctgctggtttgctctctcattagaatttaacactaaaagagcaggtaaaattgtctgaatgttctttaagttattcataaagcaaattaataaatctgatgaatatgttaaccttcagcgacatcatcggtgaaaacctataaatgaagaaggaaagcaaaaaaatgaagaccattctacctgcagtattgtttgccgctttcgctaccacttccgcctgggcggcagaaagcgtccagccactggaaaaaatcgcgccttatccacaagctgaaaaagggatgaagcgtcaggtgattcagttaaccccgcaagaagatgaatctaccctgaaagtagaactgttaatcggtcagacgctggaagtcgattgcaatttgcatcgtctcggcgggaagctggaaaacaaaacgctggaaggctggggctatgattattatgtctttgataaagtcagttccccggtttcaacgatgatggcctgcccggatggcaagaaagagaagaaatttgtcaccgcgtatctgggcgatgctggaatgctgcgttacaacagcaagctgccgatcgtggtgtatacgccagacaatgtagatgtgaagtaccgcgtctggaaggcggaagagaaaattgacaacgcggtagttcgctaaactgccgtgaagtgcggcaccccgtaggtcagacaaggcggtcacgccgcatccgacatccaacgcccgagccggttgcctgatgcgacgctggcgcgtcttatcaggcctacaccgctgtgaagtgcggcaccccgtaggtcagacaaggcggtcacgccgcatccgacatccaacgcccgagccggttgcctgatgcgacgctggcgcgtcttatcaggcctacaccgctgtgaagtgctccaccccgtaggtcggataaggcggttacgccgcatccgacatctaacgcccaagccggttgcctgatgcgacgctggcgcgtcttatcaggcctacaccgctgtgaagtgctccaccccgtaggttggataaggcggttacgccgcatccgacatccaacgtccgagccggttgcctgatgcgacgctggcgcgtcttatcaggcctacaccgctgtgaagtgctccaccccgtaggtcggataaggcggttacgccgcatccgacatctaacgcccaagccggttgcctgatgcgacgctggcgcgtcttatcaggcctacaccgctgtgaagtgctccaccccgtaggttggataaggcggttacgccgcatccaacatctaacgcccgagccggttgcctgatgcgacgctggcgcgtcttatcagcatacgccacatccggcataccatgccggatgtggcgtatcattacaacgcaatatccgccacttctttttgaacgggttgcggtttcaactgcggtttcggcgtactatctgctgcctgcggcttgtcgtagttcaaccccagcacttcgctggtgtactgcaactcgcgttctgttgccgctacatcaccgttcagcttgcgtccataagacggaacgatcgctttcaacgtagcctgccattgcgggctggaaacacgatcgccaaatactttttccagcagattcaacataatcggcgcggcggttgacgcccctggcgatgcccccaggagcgcggcaatggttccttgctggtcactgacgacttcagtacccagacgcagtacgccacctttctcggcatcacgcttgataatctgcacgcgctgccccgcttgccacaaacgccagtcctcttttttcgcctgcggatagtactctttcaacgcttcaaaacgatcctcttcactcaacatcacctgactcaccagatatttcaccagatcgaaattatccagcccgacgtgcatcatcggcatcacgttagaggtggtggtggaactcattagatcccacaatgaaccgtttttgaggaatttggttgagaaggtggcaaatggcccaaacagcactacgcgtttaccgtccagaacgcgggtatcgatatgcggaaccgacatcggtggtgcgccaacggatgctttaccgtaaaccttcgccagatggtgattaaccacgtccgggttttccgaaacaaggaactgtccgcccaccgggaaaccggcgtagtctttcgcttccggaatccccgattcctgtaacagcttcagcgccgcaccgcccgcgccgataaagacaaatttggcacgaatgttctgtgcagtgccatttttcagatcggcaacggtaacggtccaggtgttatcgtcattacgctttagggcgcggacttcgctgctgagttgcagcgagaagttagatttcttctgcaaggaagcaattaactggcgggtgatctcgccgtagttcacatcggtaccaatttccgtacgcgtggctgccactttctgttgcggatcgcgcccttccatcactaacggtgcccactctttgatctgcgcgtgatcttcagagtaacgcataccgcgaaacagcgagctttgttgcaacgcggcgtaacgggcgcgcaggaaattgacgttatcctcgccccagacaaagctcatatgcggaacggtattgataaatgaacgcggagtacgcagcacgccgcgctcaacctggtgcgcccagaactggcgggaaatctgaaatgcttcgttaatggcgactgctttttcaatactgatgctgccatcggcgttttgcggggtgtagttcagttccatcagtgcagaatgcccggttccggcgttattccagccgttcgaactctcctgcgcgacaccctccaggcgctccaccatggtcatcgaccattcaggctccagctcgcgtaaataggtccccaacgtggcgctcataatgccgccgccaatcaacagtacatcagtttcctgctcctcggacgctttcgcttttgccgccatcgaaacggcattaagccccacggccatcgagaagagcatggcagtcacttttttcatcttgttaatgccttacttttagtcgctttattgcaggtgagatttgcgcggcatcaacggtaacacttaagtaacaacatttaaataatgtttataaattatattctaattttagaaacattataatttcgttgattaattatagggttattagaaatgaagggatttttagcatattgacctgacggcagcagtccgccaggtcagcgtcgtaatattatgccgtccgggcaacggcatcacgcgaagcggcatcgcgctcttcgcccgtcagctcgctaagttgcccattgcgcatttccagcaggcggtcggcgtggataaagtaatgatcatcatgactgatagcgaaaatagttttacccatctcctgcatcagcggcagcaacacctgataaaactcacgacggaagtgtggatcctgatccgccgcccattcatccagcaggataatatcgcgttcttctgccagcgccagcaacagcgccacgcgttttttctgcccttttgataacttcaggttaacaatacgcccgttgcttaactcaagcttatgagccattttcagctgcgccagccacttctcaaccagttgcgggttagcgggtttaccctccggccccagcagttgatcaaacagccagacatcggtaaacactgccgaaaacagtttgcgataatcttccggttgttcgccgctgacaggtttgccatccagcaagatttcgccgctttgtggctgatacaagcccgtcaacaacatcgccagcgtcgattttccgctaccgttgccgccaatcagaaacagcagctcgccacgtttgatggtgagattaatcggaccaacggaaaacgcgttatcctgataagcaaacgtcacgttacgcagctccagcgtttgccagttgggaaacgcctgcgggcgcggaaactctgctttgaaaggcgcgagcgcgaatttgttcagcttgttaaacgccacctgcgccgtcagcagcgtcggcaatgcgccaaccgccgaaagcagcggcgtacgcaggaataaaagcgtcaacgaataggtcgcggcaacgttggtatcagcccaaccgaggctgttcgccatccagaacaccaggccgattgcgcccagcatcatgatgtttgaccagttcacggcactaagatggaaggtgtctgcgcgaataatatggtggcgatactcttgcgcatcaggaatgtagaggttgttaaacacatactcggcgcgttcccggttcagagtcagctctttgcgcccttcaagtacagtttgaaaatccgtgtacagcttgtcttcggtttcacgcagggtcgccatatgtttgtacacccgcgccaccagcacaaaaccgccccagatggtgatcgccatccagatagccgttaccagcaacattttgcccgacagcatccacagatacgccgctgaaccgatagtgagaatgatcccctgcaccagttccggcagacgcacaaaagcaatggtgatattgcgcacatcgctggttaaccccgccagcaacgaggcgctaccgagttgttcaatgcgctcgacgtgagtatccagaatccgcttgataaattcactacgcagtcggtaaacgaagtgatgccccaaagtggtgagcgccagttgcgatccgagagtgactgccatcaacagcagcaataatcccagaaactccggcaacaccagcagactggtatccgccgtttcgataaggcgctgattgataaaagcaattaagccaatgcctaatgccgcactggcgaggcttagcgccatcacactgataaatggccagcgatactgttattattaattccagacaagtacaagaagttccatgcagaaaacccggacaatgaattacagcccgcagtttaaacatcttcgcgcgcacagcaataataattcttatttttattcttttttacctgcctgacggaatgtcaggttgtagcggcagtcgatggtgagtggatgaaaccccgctttcaacggttgaataccgtgataaaacagccgcgattcaccgccccataccaccacatcgccatgttccaacaacaaacgtttgagcggatcatttcgtttcaggccgccaaattgaaaaatcgcgggtaagcccagagaaacagaaacaattggcgcgcgcagatccggttcgtctttatcctgatgcagcgacagtttcgcgccaggagcgtagcggttgataagacaagcatctggctggaaatctggatagcccgccgccgtagccgcacgttgacataaattatgaaaactctgtggcatggcgggccacggtttatttgtttgcggatcaatgggcgaatagagataaccttgccgatgggtcgtccagcccagatgcccacagttggtcatcgccaccgacatggtatatcccccgggggtgaccatctggcgaaacggcgactggctggcaacgtcattaatatcgcggatcagttgctccgcagcgttaaaagcaaaacgccgtaaaattaccgcaccagccgccagtggctcttgccacggttcagcatcggcaaacagatccaacattacctctcctcattttcagcttcgcggcgcagcagttgcgctttacgcgacacgccccagcggtaaccggaaagtgtgccatcaccacggaccacccgatgacagggtattatgatagccagcttgttggcggcacaggcgctggcaacggcccgtaccgctttcggtttgccgatggcgttagccagttgctgataactgacggtttcaccgcaaggtatcgtgcgcagtgcctgccagacttgttgctgaaaagcagtgccgcgaatgtccagcggtaacgtcagcggcgtatcgcgttgattgaggctggcgatcacttcacgcacatgttgctgaaacatcagatcggcaggcgcgttgtcggcagcgggaaacatctgctgcaactcgctgattagtgtcgcgtcatcatcgcccagcaatatcgcgcaaatcccccgctcgctttctgccaccaggcaacgacccagctcacaatcagccagcgcgtaacgcaccgccagattttcgccaccgtgacggaattgtttagccgtcatgcccagcgtttcgtcagctttgcgatagtaactgctgctgtcggggaatccggcgttaagaatagacgtcgtcacgctctcccctttcgccagcgattcgcgcaaacggcgagcgcgccaggcctgttgccaggctttaggcgtcattccggtagtcgctttaaacaaccgatgtagatgaaatggactcatcgccacctggtcggctaaggcttccagcgttacaggcgtttcctgttccagcagtcgacacgcgtgggtgattttatccaaccgatgttgctgggcattggctttttctggctgacaacgtttgcaggggcgaaagccagcggcgagtgcctcgctggcatttgcgtagaaggagacgttttcccgcaaagcatgtctggcgcggcaagacggacggcaaaagatgcctgtggtacgcacggcgaaaacgaattcgccgtcggcattcgggtcgcgggctaagacagattgccagcgttgatcgtcagttaagcatgtggcttttttcataatcagctccctggttaaggatagcctttaggctgcccggtcaccatcacgcaaaaaccaacaatcttgcgctttaatttttttcgctgacaaggaagcttttaaactgtggtgacatccaggttttaaagctatcgccttctttggtgatcatataaaccgccagcccttcccggcgaacaacctctttagctttctccggcccgagtaccatcaagccagtatcccaggcatcggcttccagcgccgtcggagcaatcaccgtcacggataccagattgtgttcgatgggacgcccggtttgcggatcgataacatgggaaagacgtttgccgtccagttcgtaatagttacggtagctgccagaggtgctaatcccatgaccgttgatatccaccacagcctgaaccgcgttttctttatcggttggtttttgaatcgctacccgccacggcaggccttcaccgttcataccacggctgttcagcgcgccgcccaccgacaccagatagcgggaaatcccttcctgctccatcaagcgtgccaaatgatcggccgcatagccttcgccgacggtggagagatcgacatataaatccggcaggtctttttgcagatattgctgatgcgactgattgatgaccgtcaggtgctgtaagccggttttggctttcatcgcatcgatctgttcctggctcggaatttgaaccggctgttgttccgggccaaagccccacagattcaccagcggcccgacggttatatccatcgcgccatcggtcttcgcgccaatgcgcagcgaggtggtgacgatatcggccatcgcttcacttaccggccacggcgataaactttgcgagtcgttaaagcgcatcagcgcggaatcttttttataggtcgaaagcagctgatcgtcggcgtccagttgggtctgaatcttttctttaagttcggcgctgcgtttggcgtcaatgcccgggatgctggcacgccagaaggtacccatagttttgccttcaagaacggtaacttcagtagcgtgggttttggcgggttgtggtttttgatcgcaaccaacaaagaagagcgcggcagccagcagtgccacgcgggtaaagcttatttccatacgtgattatcctcatgcgaacggtcgcaagagtacaccaaaaaactgagtttgtacgctgaaaacaatgaaaaaagggcccgcaggccctttgttcgatatcaatcgagattagaactggtaaaccagacccagagctacgatgttatcagtgttgatgccagcgtcacgagtgaactggttgtcgtccagcaggttgattttgtagtcaacgtaggtggacatgtttttgttgaagtagtaggtagcaccaacatcaacatatttcaggatatcttcgtcgtcgtagccacgacccaggtttttacctttagactgcaggtaagccagggacggacgcagaccgaagtcgaactggtactgagcaacagcttcgaagttctgtgctttgttcgcccaacccagggaacctacgcgagttgcgttgtaggtctgggtgtactgagcagccaggtagatgttgttagcgtcgtatttcagaccaccagtgtaggtttcagcacggtcgccgttaccgatgtaagcagcggtgttctgagcatcagtacgtttggagctggagatcgcaccaccgataccgaaaccttcgtaatcataagtgatagaaccgccgacgccgtcgccgttttgacgcagtgcgtcacgaccgttgttagttacgccactagtaaagccttcaccagatgggttgccgtttttaccctggtactgaacagcaaagttcaggccgtcaaccagaccgaagaagtcagtgttacggtaggtcgcgaagccgttaccacgctgctgcatgaagttgtcagaaccgtaggtgtcaccaccgaattctggcagtacgtcggtccaggaagttacgtcataaacaacgccgtagttacgaccgtagtcgaaagaacccacatcctggaatttcagacctgcgaatgccacacgggtccaggagttgttttcgttttcagcgctgttgccctggatctgatattcccactggccgtaaccggtcagctggtcagtaacctgagtttcacctttgaagccaagacgcatgtaggtctggtcgccatctacatctttgttgtcagagaaatagtgcaggccgtctactttaccgtacagatctaatttgttgccgtctttgttgtaaacttcagcagcgtttgctgcgcctgctaccagcagagctgggaccaggagggacagtactttaactttcatgttattaaccctctgttatatgcctttatttgcttttttatgccactgcatactgattaaccctcattaatcagtcggcaagtccattctccccaaaaatgcagaataatccaacacgaatatgatactaaaacttttaagatgtttcatttatcgctatagatgtttcaaaatgtaaatgcaagggaactttttaagattattgcggaatggcgaaataagcacctaacatcaagcaataataattcaaggttaaaatcaataacttattcttaagtatttgacagcactgaatgtcaaaacaaaaccttcactcgcaactagaataactcccgctatcatcattaactttatttattaccgtcattcatttctgaatgtctgtttacccctatttcaaccggatgcctcgcattcggttttttttacccttctttacacacttttcattattctgtgctaccacagaaaaactataacgcttgttaactatttcacaaataattaacatccgcataatttccagcaatctttgtttatttgcaattatttttgttgggctttttgtaggttatttgtacagcaaaatggcgcttgtacatctatttcccccaatgcaggatgataaatatcacgggagaatagagaatcatcaatcaggtaagagtctggaatttcacactgtaccctttatactgccctatcacttcgcgaagttttaacaggtcataaacacgaatgcgtcagaaagagacaacggccacgacccgcttttcactcctaccggggagcattacccgcttctttttactgttgatcattgtgttactggtgacgatgggtgtaatggtacaaagcgccgttaacgcctggctgaaagataaaagttaccagattgtcgacattacccatgctatccaaaagcgcgtcgataactggcgttacgtgacctggcagatctacgacaacattgccgcgacgacctccccctcctccggcgaaggtttacaagagacgcgcctgaaacaggatgtctactatctggagaaaccacgccgcaaaacggaagcgttaatctttggctctcacgacaactcaacgcttgagatgactcagcggatgtccacttatctggatacattgtggggcgcagaaaatgtaccgtggtcgatgtattacctgaatggtcaggataacagtctggtgctgatctcaaccctaccccttaaagatctcacctccggatttaaagaatcgaccgtcagcgacattgttgattcacgtcgtgcagagatgttgcaacaggccaacgccctcgatgaacgcgaaagcttttctaacatgcgccgcctggcctggcagaacggtcattactttacattgcgtactacctttaaccagccaggacatctggcaacggtcgtggcttttgatctgccgattaatgatttgatcccaccgggtatgccgctggacagtttccgccttgagccagacgcgacggcaacgggaaacaatgataatgagaaagaagggacggatagcgtcagtatccactttaacagtacgaagattgaaatctcctcggcactcaactctaccgatatgcgcctggtctggcaggttccttatggcaccttattgctggatacgttgcaaaacattctgctgccactgctgctgaacatcggtttgctggcgctggcgttatttggctataccacattccgccatttctccagccgcagtacagaaaacgtccccagcacggcggtcaataacgaattgcgcattttacgggcaatcaatgaagagatagtctcactgctgccgctcggcctgctggttcacgatcaggaatcgaaccgcactgtcataagtaacaaaattgccgatcatttgctgccgcatttgaatctgcaaaacatcaccaccatggcggaacagcatcaggggattattcaggcgacgatcaataacgagctgtatgagatccgcatgttccgcagccaggtcgcgccgcgcacacaaattttcattattcgcgatcaggatcgcgaagtgctggtaaacaagaaactcaagcaggcgcagcgtctgtatgagaaaaaccagcaggggcggatgatctttatgaaaaacattggcgatgcgctgaaagaacccgcacagtccctggcggagagcgcggctaaactcaacgccccggaaagcaaacaactggcgaatcaggcagatgtgctggtgcggctggttgatgaaatacagttagcgaacatgcttgcggatgatagctggaaaagtgagacggtgctgttctccgtgcaggatttaattgatgaagttgtgccttcagtgttgcctgccatcaagcgtaaaggtctgcaactgctgattaacaatcatctgaaagcacacgatatgcgccgcggcgatcgcgatgccttacgacgtattttgctgctactgatgcaatatgccgtgacctcaacgcaattgggaaaaatcacccttgaggttgatcaggatgagtcctccgaagaccgcctgacgttccgcattctggacacgggagaaggcgtaagtattcatgaaatggataatttgcacttcccgtttatcaaccagacccaaaacgatcgctatggcaaggcggacccgctggcattctggctgagcgatcaactggcacgtaaactgggcggtcatttaaacatcaaaacgcgggatgggcttggtacacgctactctgtgcatatcaaaatgctcgcagctgacccggaagttgaagaggaagaagagcgtttactggatgatgtctgcgtaatggtggatgttacttcggcagaaattcggaatattgtcactcgccagttagaaaattggggtgcaacctgtatcacacccgatgaaagattaattagtcaagattatgatatctttttaacggataatccgtctaatcttactgcctctggcttgcttttaagcgatgatgagtctggcgtacgggaaattgggcctggtcaattgtgcgtcaacttcaatatgagcaacgctatgcaggaagcggtcttacaattaattgaagtgcaactggcgcaggaagaggtgacagaatcgcctctgggcggagatgaaaatgcgcaactccatgccagcggctattatgcgctctttgtagacacagtaccggatgatgttaagaggctgtatactgaagcagcaaccagtgactttgctgcgttagcccaaacggctcatcgtcttaaaggcgtatttgccatgctaaatctggtacccggcaagcagttatgtgaaacgctggaacatctgattcgtgagaaggatgttccaggaatagaaaaatacatcagcgacattgacagttatgtcaagagcttgctgtagcaaggtagcctattacatgaacaatatgaacgtaattattgccgatgaccatccgatagtcttgttcggtattcgcaaatcacttgagcaaattgagtgggtgaatgttgtcggcgaatttgaagactctacagcactgatcaacaacctgccgaaactggatgcgcatgtgttgattaccgatctctccatgcctggcgataagtacggcgatggcattaccttaatcaagtacatcaagcgccatttcccaagcctgtcgatcattgttctgactatgaacaacaacccggcgattcttagtgcggtattggatctggatatcgaagggatcgtgctgaaacaaggtgcaccgaccgatctgccgaaagctctcgccgcgctgcagaaagggaagaaatttaccccggaaagcgtttctcgcctgttggaaaaaatcagtgctggtggttacggtgacaagcgtctctcgccaaaagagagtgaagttctgcgcctgtttgcggaaggcttcctggtgaccgagatcgctaaaaagctgaaccgcagtattaaaaccatcagtagccagaagaaatctgcgatgatgaagctgggtgtcgagaacgatatcgccctgctgaattatctctcttcagtgaccttaagtccggcagataaagactaatcacctgtaggccagataagacgcgttagtgtcttatctggcatttgcaccgattgccggatgcggcgtaaacgccttatccggcctacgattcccattatttcaacaaattacattaaagtaggccagataagacgcgtcagcgtcgcatctggcatttgcactgaatgccggatgcggcgtaaacgccttatccgtcctacgaatcccgcgatttcctgaccctctcggcatataacgtcagcgtctgttttatcacatccagcgttaccggcttcgacaggcagctgtccataccggactccagacaccgctgcttctcttcagccaacgcattagcagttactccgattaccggcaacgtcagtcccaactgacgaatgcgttgcgtcaagcggtaaccatccatatttggcatgttgacgtcgctaagcacgatatcaatatgattcttgctaagtacattaagcgcatcgacgccatcattcgcggttttacattgatagcccaacgatcccaactgatctgccagcaaacgccggttaatcggatgatcatccacgaccagaatcatcatatcgtcattatcgctgaccgctttgtccgttgacggcagagcgttagcaggatcgtcgctctccatctcgatcaaataaatacgcgccaacaatgccggtagctcatgcggagcagccacactgtgtacccactcccctggcgctttctccagcggaataccaatatggcgacgacagaaggtcactaccgctctgccctgccattttttactcactacctcgtcagtgatcaacacatcttcgggagtcggttcctgcccttcgtatgttgtaacgacgatgccgctgcgctgcaaactggtttccaggaactgacagagcgacgcattgcggaccgccagccagcagcgtttaccactcaacccttccacgccttttttctgcgggtactgagcgccgtacaacggaatacgcacggtaaactggctgcccattcccggttctgaatctaccgagatatcgccgtccatcatgctgatcagtttttcacaaatcgccagacccagaccggtcccctggaaattacgctgtacgcccgttccgacctggaagaagggatcaaacaagcgcaccacttctttcgccggtatccccacgccggtatcgcgaacacggatagagagataatcgccatccgcgcgaacatgcaaaactatacagccggtatcggtgaattttatggcgttactcaacaggttggagatgacctgctgtaaacgcatcgggtcgccatttaaggccactggcacatccggttcaataaagcagtacaagcctaactgcttgcgtaccaccagcggtaaatagttggcggtgatgtggttcatcacttcacgcggtgaaaactcacgcggttcgatcttcaactgttccgattcaatcttcgagaaatcgagaatatcgctgataattttcaacaacaggctggaagagttgttcattgccgtcaccagccgatcgacgcctttcggtaactctttggtttgcaacagatccaggttaccgataatgccatacagcggcgttcgcagctcatgactgacggtggcaaggaacatcgattttgactggctcgcctgttccgctgcttgtgccatctcctgcaacgactcttccatcttcacgcgcgaagaaacatccaccagcacacaaatggccacgttttcattacgatagcgcgaatggacgaagctgatttgcagattggtattgttgctggtcaggacatcaacaaaattgacctgctgcccacagataatttgcgtcagtcgttggcggtcctcatgcgtaagcatattgagataggtatgcgccagttcgttacttaaaatattgacgccatcagcggtacgcaaaatgcagatacccactggcgcggaggcgacaatcttgcgattgaactgctcatgttcttccagtcgcagggcgtcgctttccgccggaatgaaaatacgtcgctcgtacatccgtgcgagagtaaacaatgcagctccggcaagcacattcagcaaaattgcgttaaggatcaacatgcgaatgcgttccagcaccttatcaaccggcaccgaatacacgatgcttagcgatgagggtggcagatttttcttcagcaccagctcccggaacccttccgtatagccaaaccaggagcgttcctgcatccagcgaggatcgcccttaattttactttctggtccggtaagcgaaatcagggtatgaccattttcatcaagaatggtaacccccatcggcaacgtacccggtaagaaaaagttctccatccggatggtctgctcgacacccaaaagcgcctgcaaccggttcgccagataaactggcgtcaacgcgtaaaaatacccgacgccagggcgcggaccttcgctgatccagtagaggttactgccgctatcatcttgtggtgcatttcgatatttattgatgcgttcatgcaaagctttcaacgcggtatcgcgttccactggcatatcacgcagaccgaaattggccatgcagaggttatcgctgccgattaaaaatacccggtttagatcgtaagccgcagaaaaattatcgcgccagtagcgcataaaccacgccaatgactccagagaacctcgccaggtgttactcattgcggaacaatcggagtcggcaaacagcggttcaaacgcaggcacatccgcctgcgtttctcgtccacgcggggaaagcacaccgttttctgccgataagcgattttcggcgatgtacttcagctctttcatcacatcagaggtgcgttgaataaagcgctgagcctgatcggaactcagattaaattcctgacgaatttccgattctcgctgatgtaacgcattaacgatgtaaaaaacggatgaaaaagcaatcaacagccagagcactaacgccaatgctctgaacatgtagcgcgaggctttcagggttgtacgaaaagaagcaaggtatttcaaaggggcgaagctccgcctcaggtgaccgatggagtgtggttaaggtagcggtaaaagcgtgttaccgcaatgttctctcttctctggaatatgatacaccgccgagaaatcatcaccttaacctctgataatcgtcatataccggacaagactagtggatttcagcatgcattatatgaagtggatttatccacgccgcttacgcaatcaaatgatcctgatggcaatcctgatggtcattgtcccaacgcttactattggttatatcgtagaaacggaaggacgttcagcagtcttatctgaaaaagagaaaaaactttctgccgtggtcaacctgcttaatcaggcactaggcgatcgctatgatctctacatcgacttaccacgtgaggagcgtatccgcgcattaaatgcagaacttgcccccattaccgaaaatatcactcacgccttccctggcatcggtgctggttattacaacaaaatgctggatgcgataatcacctacgcgccttcagcgctatatcagaataatgtcggcgttaccattgccgcagatcaccctggtcgcgaagtgatgcgtacaaatacccctttagtttattcaggcaggcaggtgcgcggcgatattttgaattcaatgctccccattgagcgtaatggtgaaatcctcggctatatctgggccaatgaattaaccgaagatattcgccgccaggcctggaaaatggatgtgaggattatcattgtgctcaccgctggtttgctgataagcctgctgttgattgtccttttctcccgtcgcctgagcgccaatattgatatcatcaccgatggcctctcgactctggcacaaaatattcccactcgattaccacaattgcccggtgaaatggggcaaatcagtcagagtgttaataacctcgcccaggcactgcgtgaaacgcggacacttaacgatctgattattgaaaacgctgccgatggcgtcattgccattgaccgccagggtgatgtaaccaccatgaacccagcagcagaagttatcactggctatcaacgccatgaactggtagggcagccttactccatgttgttcgacaatactcagttctacagtccagtactggatacgctggaacatggcaccgaacatgtggcgctggagatcagttttccaggtcgtgaccgcaccattgaactcagtgtcactaccagtcgtattcataacacgcacggtgaaatgataggtgctttggtgattttctctgatttaactgcccgcaaagaaacccagcgccgcatggcgcaagcagaacgcctcgccacactgggtgagctgatggctggcgtcgcgcatgaagtacgtaatccgttaacggctattcgtggttatgtacagatcttgcgccaacaaaccagtgacccaatacatcaggaatatctgtccgtagtactcaaagaaatcgattcaattaacaaagttattcagcaattgctcgaattttcacgtccacgccacagtcaatggcaacaagtcagcctcaatgcattggttgaagaaactctggtactggtacaaaccgccggcgtacaagcgcgggtcgacttcataagcgaactggataatgaattaagcccgattaacgccgatcgtgaactgctcaaacaggtactactgaatatcctgatcaatgccgtccaggctatcagcgcacgagggaaaattcgcattcaaacctggcaatacagcgactcacaacaggccatttcgatagaggacaacggctgtggcattgatctctcgctgcaaaaaaagatcttcgatccctttttcaccaccaaagcctcaggaaccgggcttggtctggcgttaagtcaacgcatcattaatgcccatcagggtgatattcgcgtcgccagtttgccgggctacggcgcaaccttcacgcttattttaccgatcaacccgcagggaaatcagactgtatgactgctattaatcgcatccttattgtggatgatgaagataatgttcgccgtatgctgagcaccgcttttgcactacaaggattcgaaacacattgtgcgaacaacggacgcacagcattacacctgtttgccgatattcaccctgatgtggtgttgatggatatccgcatgccagagatggacggcatcaaggcactaaaggagatgcgcagccatgagacccggacacccgttattctgatgacggcctatgcggaagtggaaaccgccgtcgaagcgctacgctgcggagccttcgactatgttattaaaccgtttgatctcgatgagttgaatttaatcgttcagcgcgctttacaactccagtcaatgaaaaaagagatccgtcatctgcaccaggcactgagcaccagctggcaatgggggcacattctcaccaacagcccggcgatgatggacatctgcaaagacaccgccaaaattgccctttctcaggccagcgtcttgattagcggtgaaagcggcaccgggaaagagttgattgccagagcgattcactacaattcgcggcgggcaaaggggccgttcattaaagtcaactgcgcggcgctgccggaatcgttgctcgaaagtgaactgtttggtcatgaaaaaggtgcatttactggtgcacaaaccttgcgtcagggattatttgaacgagccaacgaaggtactctgctcctcgacgaaattggcgaaatgccgctggtactacaagccaaattactacgcattctacaggaacgggaatttgaacggattggcggccatcagaccataaaagttgatatccgcatcattgctgccaccaaccgcgacttgcaggcaatggtaaaagaaggcaccttccgtgaagatctcttttatcgccttaacgttattcatttaatactgccgcctctgcgcgatcgccgggaagatatttccctgttagctaatcactttttgcaaaaattcagtagtgagaatcagcgcgatattatcgacatcgatccgatggcaatgtcactgcttaccgcctggtcatggccgggaaatattcgagagctttccaacgttattgaacgcgccgtcgtgatgaattcaggcccgatcattttttctgaggatcttccgccacagattcgtcagccagtctgtaatgctggcgaggtaaaaacagcccctgtcggtgagcgtaatttaaaagaggaaattaaacgcgtcgaaaaacgcatcattatggaagtgctggaacaacaagaaggaaaccgaacccgcactgctttaatgctgggcatcagtcgccgtgcattgatgtataaactccaggaatacggtatcgatccggcggatgtataacaccaaaacttgctatgcagaaatttgcacagtgcgcaattttctgcatagccgctcattctccttataaatccccatccaatttatcccttcatattcaattagttaaataactaaatccaataatctcattctggcactccccttgctattgcctgactgtacccacaacggtgtatgcaagagggataaaaaatgaaaacaaaattgatgacattacaagacgccaccggcttctttcgtgacggcatgaccatcatggtgggcggatttatggggattggcactccatcccgcctggttgaagcattactggaatctggtgttcgcgacctgacattgatagccaatgataccgcgtttgttgataccggcatcggtccgctcatcgtcaatggtcgagtccgcaaagtgattgcttcacatatcggcaccaacccggaaacaggtcggcgcatgatatctggtgagatggacgtcgttctggtgccgcaaggtacgctaatcgagcaaattcgctgtggtggagctggacttggtggttttctcaccccaacgggtgtcggcaccgtcgtagaggaaggcaaacagacactgacactcgacggtaaaacctggctgctcgaacgcccactgcgcgccgacctggcgctaattcgcgctcatcgttgcgacacacttggcaacctgacctatcaacttagcgcccgcaactttaaccccctgatagcccttgcggctgatatcacgctggtagagccagatgaactggtcgaaaccggcgagctgcaacctgaccatattgtcacccctggtgccgttatcgaccacatcatcgtttcacaggagagcaaataatggatgcgaaacaacgtattgcgcgccgtgtggcgcaagagcttcgtgatggtgacatcgttaacttagggatcggtttacccacaatggtcgccaattatttaccggagggtattcatatcactctgcaatcggaaaacggcttcctcggtttaggcccggtcacgacagcgcatccagatctggtgaacgctggcgggcaaccgtgcggtgttttacccggtgcagccatgtttgatagcgccatgtcatttgcgctaatccgtggcggtcatattgatgcctgcgtgctcggcggtttgcaagtagacgaagaagcaaacctcgcgaactgggtagtgcctgggaaaatggtgcccggtatgggtggcgcgatggatctggtgaccgggtcgcgcaaagtgatcatcgccatggaacattgcgccaaagatggttcagcaaaaattttgcgccgctgcaccatgccactcactgcgcaacatgcggtgcatatgctggttactgaactggctgtctttcgttttattgacggcaaaatgtggctcaccgaaattgccgacgggtgtgatttagccaccgtgcgtgccaaaacagaagctcggtttgaagtcgccgccgatctgaatacgcaacggggtgatttatgattggtcgcatatcgcgttttatgacgcgttttgtcagccggtggcttcccgatccactgatctttgccatgttgctgacattgctaacattcgtgatcgcgctttggttaacaccacaaacgccgatcagcatggtgaaaatgtggggtgacggtttctggaacttgctggcgtttggtatgcagatggcgcttatcatcgttaccggtcatgcccttgccagctctgctccggtgaaaagtttgctgcgtactgccgcctccgccgcaaagacgcccgtacagggcgtcatgctggtcactttcttcggttcagtcgcttgtgtcatcaactggggatttggtttggttgtcggcgcaatgtttgcccgtgaagtcgcccggcgagtccccggttctgattatccgttgctcattgcctgcgcctacattggttttctcacctggggtggcggcttctctggatcaatgcctctgttggctgcaacaccgggcaacccggttgagcatatcgccgggctgatcccggtgggcgatactctgttcagtggttttaacattttcatcactgtggcgttgattgtggtgatgccatttatcacccgcatgatgatgccaaaaccgtctgacgtggtgagtatcgatccaaaactactcatggaagaggctgattttcaaaagcagctaccgaaagatgccccaccatccgagcgactggaagaaagccgcattctgacgttgatcatcggcgcactcggtatcgcttaccttgcgatgtacttcagcgaacatggcttcaacatcaccatcaataccgtcaacctgatgtttatgattgcgggtctgctgctacataaaacgccaatggcttatatgcgtgctatcagcgcggcagcacgcagtactgccggtattctggtgcaattccccttctacgctgggatccaactgatgatggagcattccggtctgggcggactcattaccgaattcttcatcaatgttgcgaacaaagacaccttcccggtaatgaccttttttagttctgcactgattaacttcgccgttccgtctggcggcggtcactgggttattcagggacctttcgtgatacccgcagcccaggcgctgggcgctgatctcggtaaatcggtaatggcgatcgcctacggcgagcaatggatgaacatggcacaaccattctgggcgctgccagcactggcaatcgccggactcggtgtccgcgacatcatgggctactgcatcactgccctgctcttctccggtgtcattttcgtcattggtttaacgctgttctgacggcacccctacaaacagaaggaatataaaatgaaaaattgtgtcatcgtcagtgcggtacgtactgctatcggtagttttaacggttcactcgcttccaccagcgccatcgacctgggggcgacagtaattaaagccgccattgaacgtgcaaaaatcgattcacaacacgttgatgaagtgattatgggtaacgtgttacaagccgggctggggcaaaatccggcgcgtcaggcactgttaaaaagcgggctggcagaaacggtgtgcggattcacggtcaataaagtatgtggttcgggtcttaaaagtgtggcgcttgccgcccaggccattcaggcaggtcaggcgcagagcattgtggcggggggtatggaaaatatgagtttagccccctacttactcgatgcaaaagcacgctctggttatcgtcttggagacggacaggtttatgacgtaatcctgcgcgatggcctgatgtgcgccacccatggttatcatatggggattaccgccgaaaacgtggctaaagagtacggaattacccgtgaaatgcaggatgaactggcgctacattcacagcgtaaagcggcagccgcaattgagtccggtgcttttacagccgaaatcgtcccggtaaatgttgtcactcgaaagaaaaccttcgtcttcagtcaagacgaattcccgaaagcgaattcaacggctgaagcgttaggtgcattgcgcccggccttcgataaagcaggaacagtcaccgctgggaacgcgtctggtattaacgacggtgctgccgctctggtgattatggaagaatctgcggcgctggcagcaggccttacccccctggctcgcattaaaagttatgccagcggtggcgtgccccccgcattgatgggtatggggccagtacctgccacgcaaaaagcgttacaactggcggggctgcaactggcggatattgatctcattgaggctaatgaagcatttgctgcacagttccttgccgttgggaaaaacctgggctttgattctgagaaagtgaatgtcaacggcggggccatcgcgctcgggcatcctatcggtgccagtggtgctcgtattctggtcacactattacatgccatgcaggcacgcgataaaacgctggggctggcaacactgtgcattggcggcggtcagggaattgcgatggtgattgaacggttgaattaatcaataaaaacacccgatagcgaaagttatcgggtgttttcttgaacatcgacggcgaaggtaaccccattaatcaccagtcaaaacttttcaccagcgtcagctcgccagcattacgcatcggtacaataaatgtttcctgtttctcattgaccgatccttcatcggtgatcagcgtcagttgggcggtggttaattccgtttcgctgcgcccaccatagtagttgatatacacctgatagcgcccgtgaattggcgcgggcatggcgaaaatctcgggtccgtaccccgtcgtgacatccatatccagtgcaccactgtttttcagcacggtgttaccgtaccaggcgtgttcgccatcgggcgtaacaacgtgaaggtcgaggtcggtattgtccgtatcccacgagagaaccagccgtaaacgtgcacgaatcgttcctgtacccggcgttgagtaaaactgcattttttgtcggctttgcccatccgggctgatgacctgcacgctgttgctgccttcagtgaaaatataagggcgtgcaaatgaaccatcggattcaattctctgcggcatactggcaccgttgaccaccagccggccctgctgaactttacccgccgcagcataattctttattttgccgcggatctgcgctgagatattttgatcatctgccatgttgacggacgacgccgggtaattgatcgattgtgaaaaactggcatcttcgccctctgccggatgccagcctgagagcggtgcatcaatctcgacttcctgcacaccttcactgtgagcgacaggcgaaagcgccaccagtaacaacggaagaaaaatctttcgcatagcattagtccattaataattgtcgggtcagcgtttcgatatagttctcatcaagcccggtgggataaccatcaaaggccaggtgcagatactcatgggttaaatccagccgatcctgaagcgtaaagaagttacgaataaacagccgtttctgctgccgatcggtataggggaaacctgagactaaacggcaaaccgcaaacacgtctggttcgttgtaccccgtctcagcttgtaatatacgccgccactgcggcatttttttcgccagccaggctttcgctttgggtaataactggcaggttgagcgtggcgctccccagcggctaagactgttgtcgggataagcaaacgcgagtatctgatcgtaacgctctccctgccccgcctgggccgtggcttgccgccaggaaagtgtcccttcggtagcgcgactgccatgataatgaaccggatcgcctgcatagatgagatcctgcgtccaggcggtcatcgttcgcgcccccgtggtcgctggcgaagcagaaacacgctgcgtggcgctgctgtcggggatggtcaggcaatcgccttcccgattggcgttttgctgtaaaaaagtgcgaatcgccacggtcatggctttcgctgcctcagggggcgtacttttcgcctcgcgatccagaactctggcaacgtactcttcacgatcgagatgcgactgcaatttcagtttgcccttttcgctcagtaaggtcgtctcaccgtggctgacaaacgtaatgtggttaccattagtaaacgtcacacgatagcgcccattaagtacgccgggatttactgccgtcgtactcttttccgctgtgattttcttcagcggatagcgggcaaacagctccacctctacacattgcccactggcaacctgcgtcggcactggcaaaacccgattaagcaccgtcgcataacgggttagtaccgttttgctggtgccactgccagtaacccacagcggtgtaccatcggttaaccagccagcaaaaccaccctgacggatttcctgtttatcatcggcaaaccagctccaggttttcacccgtacccgactaccgagcatggatgcgacaccgattttcgcctcgtccagcaccacatccagtaagacttcctgagctttgttttgcgcgggtaacgtcgctaatgaatcaagcagcgatttaaccgttaccgaggtttctggcttcagcgtagtcagagacgctaaccacgcaggtgcctgacgctgttgccagtattgcccccacacatctgcgccaatatgcaaccgctgcggcgcaaaatagagcccacaggaacgtaccagcgcggtatcgcgcgttatgctctccccagcctgacaacaataaacctcttccggggagtttccgcgacactggtagggctgctccggttgatgggtatcctccagccaggcgtaaacatacagtttccacaaactccctaacggcgtggtgagcgagtcaggtaatgctgagactttggtcacgcctgatgacgacagctgatacagttgatcgtgctgcgcaccgcgcagcaccagttgtaacggcgtctcctccgcaagtgttggcagagtaaccaacgccaatagccagacgattctgcgccagttcacttatttcacctgcatcccggtccattcactccctgccgcaacactttgctgcgcaggtgcataggaacgcacataacgagcaggaggcagaacgaattgccctttttgcgagaagcgcagcaaatggcggaaagtgaccgttcccgtcagttctttcaccggcaccatataggccagttcgcccatttcatttcgcgctttttccagcaattgcccctgctgtttcgcggcgttgggtttattgaccgaaatgccccatgttgtgcgctcaacgtcggctcccggtggcagcggtacttccacctgaccgtagcgcagaactgcatcctgctcgctggtaagcgtgatttcatcgagatacagcgcatcgctgtcaatctcattgctggtcaccggttgcagaataaagctcatctcttcttcaccagggataagccgatacaactggcgttcaacggtcaccggaatgttactttgttgagccatttttgccggctcacgtcagcggacctgcacattttgcggcgataattcgtcaccaaaagagagaatgtccggcacgccctgaccaacccaacgccagtcttcgccccctccagttaacttatgtttagcccatgcgcccgcaggcgcaggcaaaacaactggaggcattgtcgccatatatttcgccagccagttcatggccagcgcgcgctcaatagtggattgctcagcggtcaaaccacttaaaatagcggccgtctgggtagcgtcgccaccgctattaagcagcacaaccgtgtgcgccagcggctgattgctgtttgccgctttatcccacgcatattgctgaacctgtggcatcaccgtggacttcaactgcgcttttttcagcaacgtcatggttaagacgtttgccaccgcatctgccagtggagactccggtgtatcgaggatcaggctatcattgatatcgcgggtgtcttcctcagagaaatcttcagttttagttccgcgccgggcgatagcttcatccaaccctttcaacaacgttttgcacggcaaattcatctcctgcgcccatgccagcaccagcgcccgatgcaataacggcatgttatctgcctgctccgcgtagctgtcgagcatatgctgccagtattccggttgttgcgttacgccgatcgcctggctggcctgccagtcggcgtaccatgcccatgccgtaaggaaggcgtcaccattgccatcttcaccccaccaggtaaagcgcgctccgggccccgccagttgcatcagccgcagacggttatcctgaatcatctgacgaatgtcgttagcggcggcactttgatgatcggcaagcgaacgccaggcgagactgagcgggatcagacggctaccggtgttgattacgccaccccacggttcatcgactaacgcatcaagattgttgcggaaaatctcctgcggcgtttcactactttgtagccggatattgctcgcctgctcgggcaacatcagcgcgttatcgccaccaccgagcatgacatttttctgctgttcaacgggccagctgttatccacaaaagacagttttgtgctaatgctgtcctgcacttgcccattttgttgcagttctgcacttaacaagccagattgctgaatattctgcgtcagcgaaatataattcgcccctttgtgcagcgtcagcgtctggcgcatctcagcgcctgcaaatttagtcaccagcgccaccggttcgttatcctgctgactgaagataaacagtcctgccgccggtttgtcgcccacgcgatacaccgttggcatactccacttcatgtagagatttttttccgaacgcagataagcacgcccctgcccgaccagcccgtcgccgttcatcccacgcgcggtgatacgccagcgggttaacgaatcaggcatcaggaacgtgaaatacgctttgccttgtttatcggttgtgagtgacggcatccatgccgcggtatccacctcttcacgccgtggacgttcaagcatttttactcgccgctcgctgcggttagttgcgccaggcgcaaccggctcgctggagagcgcctggtcgtagctgataaacgacagactggagctggtacgcacattgttacgccccagcggatagaaaaatttgccgatattcggcgcgatttctggttgcagcgcgtagatcatttcatcgaccacgcctaccgttagctgcgcagaaacaggtttacctttcagcgacgaggttaattcgacattgaccagttcaccaggctggtaatgggttttgtccgttttcacccggatatccagctggggaacggcaactttgatcccggcgttctgaaaactgtactgaccgttacgggtatacagcaccgaaaaagtgatgttaggcgcaaaggaattgctcactggaacccgggcttcatactgggtatcgtttaaacgttgtagcgttagccagtttgccggatgcgaaagcagcgactgctgttccacgcgatcgcgttccagcgtcaataatgcttcatcaattggctccggaaaggtaatcagcatcttcgcggtttcgcctggctggtacagcgttttatccgccacgatatctaccgtaccagtatgcgccgtgctgcccttaccgctgacggcatgacttaacccagcgagaattaagccgtctttatcgcgtaatgtcagattgtagttgccaggtttagcgaaattgacggtaaaggatttgccgcctgacggtagctctccgctatggctcgtgcggtcttcgagacgcaaccattcatacgtaacaggaacctgttttgaagattccagcgcggcataacggaacacaaccgactcgccgctattactgtattgtgcggcagtacttaatgagtaatgcgccagaccgcgttcaatgaggatctctttggtggtggtgacgcgatacgccgcgccgtcactggcggagacggttaacaaatagcggctcggtttatcggcggcggggagatttaacgccacatgaccgctggcgtcggacaccgtttcgctgccttccagcgacacggggaaacgtccggcataacgcaaatcgttaccgaccattgataattgctgagcgcgcaaacttaactgcacgcgggcattttttaccggctcgccatccgggtagagcagttgcagtttgccgctgaccgcttcgccagttttgaactcttttttggcgagagctaaaccaatctcgaaatgtggcttgatgtagtttgccacgcgaaaactgctgctatagacctgattgcggtaagcaagacgtaactcataacctccggctacggcattttctggcaggcggaaacttccctgcccgccattgcgcgcatccagcgtgacattgacggtttgcaacagactgccgttggcgtccagcaccgaaagcttcgccggggcgctgacgatgggggatgaatgcaacggatcgtggaactcgcggccgatcactttaacatcgacacgatcgcctgcgcgatatagcgggcgatcggtaaaaatatacaagcgggtgttgtagatttcgctttcgtagaagaagttctcggagacaaaaacgccgccttcagcatccttacccagaatgtatgaacgttctggcgatatatgttgtaactgcaaggtaccgctgtcatcggtcacaccgcgggtcatcacgccaagaccgtcagtccacaagatctctgagccgggcttcgcttcaccctgttttttacccgcggtccacaccagaagctctttgcctgacactttgctaagcgccacggtatcggaaacaaacaccaccgtcgtcgcccgatacccaccaaccatcgcctcgacgaggtacagtcccggctcttgttggccgagaggaatataaatgttacccggctgcggcgagatgaaattgctggatgcgccttccagttttaccccttgctgcggctcgaacggtttagcctgccatagtggataacggaactgtttcaccaggggatattttttcagcggggaaaactggttgttctgtacataacgggaaggtttaataatggcattgccgagctgtaattcgggtaacgcctgagtcacattctgccgtgactgagaagagaaagtacgctgcatcacgcggcgagatttgccgtaccagttatcccacagccaggttagcgtattgttcagcccgtcgcccagatattgcggttgcaccacaatgcgatgcaggtttttctgctggcgcaaaaatgccatcgggtcaggaatacgatacaggcgaacgtccacgccgccgtactcttccatctgatagcgccgataatcacgccccggcgcttccagtcgcactttcgcctcttcactgctgctaaaactgctgtcagcaagcaaaaagaatgttcccccggcaggcggcgcatagttgctggaaggaagcgaatcatcagcattagcaagccctgttcccacaagagacagggacaagcacgctgctatcgcgccagaaaatttaaacgataaatgccaatgaaattgggattggaatcgttgggtatccatcgggtgtccttccatgtcataagttgttgcagactgactgcgcgcattccgttgtcagttttcgtggcgcttccggtgtggtagatgacgtaacgccccatccagaccattaagtgctgggcatcgccctgatcgaaaaaaatcatatcgccaggcagcgcctggtttatgtcctggccaataaactggctgttgtactgaatcaaattaatcgcggtcacataggggccggttttcccgttcccctgattccagttttgcgccagttgacgctgttcaggtgttagcgtcatctctggcggcaaatactggctagataaaccgttactttttagccatttactgtcgtgaactttcagcgtctcgttcgccgcaaatcgcaccaggcccgcacaatcctgctgataccagcgtggacttggcccctggcggagctgttcttgtgcaatgcgtacaaaccaggcgcgaaacagcccggattgttcgacattcagcatttcgctatgggcaacaacacaacacagccagcaaatcagcgccagcagcccgtgcctcatagcggctgccaggttatgggtagccactgccaggcggcaccgggttccatctgggccagcttcatgacataacgcggttgttgagataaagcgtccagcttcggcattaataaagtttgtgcggcgttataaaaaaccggttcgagattcttcggcagactggtcaacgtttcgttacgcagcagtttcgctattccttgtggattgatatagagcggaacgatgccatcagtgggtattacatccaccattgccgggcgggttttattcagtgtttgcagcgcgttattaaccagcgtgtcatcgagggagaaaagcagcgttttgttttgcatcgccagcgacacacggaaaaaataatccgacattaattgatcgggttgcgccgcctgcgctttcggatactggccgtatcgggaactcacttcgcgacgccagatttgcgcttcgccctgctgagtctggcttaccggcaaaacaccttctggcgctttgctttcgtgcgcaccaatattttgcgtaaacagtttccctggcaattgcgcctgttcggcagtgccatcaaactgaccgacaaacagcggggtttgcaattttgagtcttcataccagcacagccccgcggcaccgtctaacgccccattcagcttgtcgttttcctggctgatgtgcgaaagcatctcttcggcaataccgtgtgaatacggcaccgccacacagaagctggctccggcaggcatactgttccataccggcgtaaaatcgaaactggcatctacgctggcggattcatcatttaacgccacaaaactgtgccagccgtcgttacccatttcgaagcgtacgccagcaaaagaaggcattaaccgctggtagccaaaccccagccacctggcgctgactacgatgcgctggcgtactggcgttttttcggcagtacgctcttccaggccaaagcttgcttgccagcgttttttgccgctcaacaaatcacctgcgatcgccgtggcttcggtatcctgctgatcatctttaaacaacatatccgtgctggaaaacaccagcatcttgtcctgataagtcgcgaacatcagggcgttattgccgttatagcgcaactgataaacaggaacagtttcactatttatcttgatgctactgatttccgttttgcttaactggctgtcgctggtagcggcaaacaacaatggctccagcagtttgcttaaaccactgcgctggatcagcaccatataatgtgaaagatggccttgtttatcgtgccacagcgctgcctgcgcgggctgatctaagagtgacgaaaagagcttatctttcagcgtgagatcgtgttcatagacaatacgacgaatgctgccttcaatgcccagacgatcggcatgattctgataatagaaaacgaaatcttcgctcagaacatcgtggagaaacggaatggtgaggagatctttgggaagctggctcagagagtcgctgtcgagaaagaggtccggctcattgagatcgatttgcagattgttgtgcaccaccagcggcgacaacgttttttctggcccactgccagcatattgcaacgcccagacgccagcggaaagcagtgctattgcgccaaaacctacaagaccatagaaccgccagcctttcgcctttttttcaccactcattgccacattccttgtgtatagccagccattttttacgggcacagccaaactttaccgtgccctaatacgacaaaagcccagactttgcagcctggacttttcaattcaaacaagggagatagctcccttttggcatgaagaagtaaaattattcttcttctggctcgtcgtcaacgtccacttccggagcgatttcatcgtccccttccgcggcactgccgtcgatggtatccagatcttcctcgtcaaccggttcagcaacacgttgcagacccactacgttttcatcttccgcagtacggatgaggatcacgccctgggtgttacggcccacgatgctgatttccgaaacgcgagtacgtaccagcgtaccggcatcggtgatcatcatgatctggtcgcagtcatctacctgtaccgcgccaacaactaaaccgttacgttcggtaaccttgatggagataacccctttcgtcgcacgcgacttggttgggtattccgccactgcggtacgtttaccgtaaccgttttgcgttgcggtgaggattgcgccatcgccacgaggcacgatcagagagacgactttatcgccttcacctaagcgaataccgcgaacaccggtggtgttgcagcccatcgcacggacagaagactctttaaagcgcaccactttaccttcagcggagaacagcattacttcgtcttcgccgctggtcaggtcaacgccgatcagctcatcgccgtcaaccagtttgatcgccactttaccggcggtacgcagacggttgaactcggtgaggacagttttcttcacggtaccgttagcggtcgccatgaagactttcacgccttcttcaaactcggtcactggcaggatcgcagtgatacgttcgtcctgctccagcggcagcaggttgacgatcggacgaccgcgcgcgccacgagtggcttccggcaactgataaactttcatcgaatagacgcgaccacggctggagaagcacagaatatggtcgtgagtgttcgccaccagcagtcggtcgataaagtcttcttctttaatacgtgcggcagatttacctttcccgccacgacgctgcgcttcgtattcagaaagcggctgatacttaacgtagccctggtgagagagcgtcacgaccacatcttcctgggtgatcagatcttccaggttgatgtctgcgctgttggcggtgatttcagtacgacgtttgtcaccgaactgttcacgaaccagctccagctcttcacggatcacttccatcagacgatcggcgctaccaagaatacgcaacagttccgcgatctgatccagcagctctttgtattcgtcgagcagtttttcgtgctcaagaccggtcagtttctgcaaacgcagatccagaatcgcctgagcttgctgttcggtcaggtagtacagaccatcacgcacgccgaactctggctccagccattccggacgcgcagcatcgtcgccagcacgttcgagcatcgcggcaacgttgcccagctgccacggattagcaaccagcgcagttttcgcttctgcaggcgtcggcgcatgacggatcagttcgatgatcgggtcgatgttcgccagcgccacggctaatgcttcaaggatatgagcacgatcgcgagctttacgcagttcgaaaatagtacgacgggtcaccacttcacggcggtgacgaacaaacgccgcgatgatgtctttcaggttcatgatcttcggctgaccatggtgcaatgccaccatgttgataccgaaagaaacctgcaactgggtctgggagtagaggttgttgagcacaacttcaccgaccgcatcgcgtttcacttcaatcacgatgcgcataccgtctttgtcagactcgtcacgcagcgcgctgatgccttccacgcgtttttcttttaccagttccgcaatcttctcgatcaggcgcgctttgtttacctgatacggaatttcgtggacgataatggtttcacgaccggttttggcgtcaacttccacttctgcgcgagcgcggatatacaccttgccgcgaccggtacggtaagcttcttcaataccgcgacgaccgttaatgattgccgccgtcgggaagtccggccccgggatgtgttccatcagcccttcaatgctgatgtcttcatcatcaatatacgccagacaaccgttgatgacttccgtcaggttgtgcggcgggatgttggttgccatacctacggcgataccggaagaaccgttcaccagcaggttaggaattttggttggcatgacgtccggaattttttccgtgccgtcatagttatcaacgaaatcgaccgtctctttttcgagatcggccatcagttcatgggcaattttcgccagacggatttccgtataacgcattgccgccgcagagtcgccgtcgatagaaccgaagttaccctgaccgtctaccagcatataacgcagcgagaatggctgcgccatgcggacgatcgtgtcatagaccgccgagtcaccatggggatggtatttaccgattacgtcaccaacgacacgggcagattttttataggctttgttccagtcattgcctagtacgttcatggcgtaaagtacgcgacggtgtaccggcttcaggccatctcggacatctggcagcgcacggccaacaatgaccgacatcgcataatccagataggagctcttcagctcttcctcaatgttgaccggtgtaatttctctcgcaaggtcgctcatctaaccgctatccctctactgtatcccggattcaaaggtcgcaaattataacacagccgcgcagtttgaggtaaacctatacgctttattcacatccaatgcctgatatactcgtttgtcttgccaattacggagtagaagtgccaatgaatgccgaaaaatcgccggtaaaccataacgtagaccacgaagagatcgctaaatttgaagccgtcgcctcccgctggtgggatctggaaggtgagttcaaaccgctgcaccgcattaacccgctgcgtctgggctatattgccgagcgtgctggcggtttatttggcaaaaaggtgctcgatgtcggttgtggcggcggcattctggccgagagtatggcgcgcgaaggcgcgacggtgaccggtctggatatgggctttgagccattgcaggtggcaaaactgcacgcactggaaagcggcattcaggtggattacgtgcaggaaaccgtggaagagcacgcggcaaaacatgccgggcagtatgatgtggtgacctgcatggagatgctggagcacgtccccgatccgcagtcagtggtcagagcctgtgcgcaactggtgaaaccaggcggcgatgtctttttctcgacacttaaccgcaacggcaagtcatggctgatggcggtggttggtgcggaatatattttgcgcatggtgcccaaaggcacgcatgatgtgaagaagtttattaaaccggcagaattgctgggctgggtggatcagaccagtttaaaagagcggcatatcactgggctgcattacaacccgatcactaatacttttaaactcggccccggcgtggatgtgaactatatgctgcacacgcagaataagtgaggttgatgtttggccgcgccaatgcctgatgcgacgcttgccgcgtcttatcaggcctacaaatgctccccgtaggccggataaggcgtttacgccgcatccggcaaccgtgccgactagacagtgattaccatttcaccgtcatcgacaaaaaccctgccgtctgggcaaaatcatcactccctttctgccacgccacgctgccgcgcagggacactcgctgactgatattgcccgtgactcccacttttatttcaccccgttgcttcaccgcatcgtcactgatagtgctgccatcctcttcaatttccgtcgaatggggatcgtgataataattcagatctaatgttggtatgacatgaacagcggtacgccattcgctgtgtaaacccagccgcgtctgaatatcatcaccctgcgattgtgacacgcgcgcacggttagcggcggtaaaatcatcctgctgcacgccctgataaatcacctgcgcctgcggttcaatcaccacaccacgccccggtaaccactgataccccgcctccagcgaggcgataatccccgacgagtggtaatgatctgtgccatcttcttgttcggaaacatcattgctaaaccacgcgtattgcagccagctatccagccaggccccttgcttctgattaccgtgctgaaaccagcttgatgtcagcccaacggcataaccgtggttctggttatcggcgcgagttccggtcatattcgagcggctgtcgccctggttatcgctgtagccaccaacaatcccaagcatccactcgccatccgtgccccagcgcccgctaaacagatcgccgctaagttgcaccgtagaagtgtcttcatgttgagccagttgccccgctgctgtgtaatgataatctccgccgataacacgtaaattcagcgtctgaccatcgccacctgcgtgatcgcgtcgctccatcataaacgcctgatttgccgcccgcaggttattaagataaccgccaactttggcattcaacaccggctggtaagcaggcgtaggttccgggtcgggtgttggatcaggatccggcgtgggatcaggatcgggagtcgggtctggatcaggtggcgatggcggcgttacttcttgcgatcgcagataccagtcgttgttatcttccaccagcgtgtagtcatacgctcccatattgacgtagccgctgcctgccagactgaactgcgcattgttttgaaactgcgtgggatcagctgcgaaatcaaccactttaatgcctgtcgatgtcggctcaccaatccctgtaatggagttaaccaccacagttgtgttgccagcagtattaccgttcatcaccaattgatcgcttaccgagtcatcgccgtttaattcgctatcgagcagtagcgtaccgccgccggtataatcaccgtttaccgtcagcgtatcgccagcgacgccattttgcaggctaaccgcaccggacgtattggtcagattgccattaaccgtcacgttggaaagataagtcaggctgtcagtttcaaggttggtattaagctcacctgtcaacgtcacaccatcggtggcattcaccagcgtcccatcgccgttaaatagtgaggcattaagggcgacggaagtatcctgcccggtcaggcgcaaaaccgtaccatcgctgatgtcgatagtgccgctggaaatagcatcaattgactgaatatcctgatccgcgccagtaacgaacgttgccccatcaccaacccacagtgacgaagcataaggaaggatatcagcaacatcacctttcagggtgccttcttcgacacgtaccgccgactgcgttgtaccgctggcggtcagctccagtgtaccagcccccgttttagtcaatgtgctaccctcatcctgatgctgcccgctgctgtcagccatcagtgcgccccactgcgtgtctacccccgcatcaactgccacttcaccgtcggcgcgcatttcaatatcacgtccgtggcctgccgcatctgaacgcgtgtcaacgtcggaggtaatctccatcacgctttcttgttgcttatcggtaaagataacctggcggttatagtgggtatctccaagctgcgagttgtcgctcaccatcagcgtaccggaggcgatttgtgttgtgcccaaataactattattgtttgccagacttacctgcccgtcgctcgcatcgaccaccacgtagacgccatctttcccgtcgccgccgatatgcaaattgtcgccacctgcaagatctaccacatcctgactgccgataaccgttccgctgctgccactgacttcaaggccatcgttgtatgatgtgccgctctgccaggtggagaaatcagagagatcgagcacaccgccgtttaacacgatcgactgcggatcgtcctggagagcggtaagatctgccgcgtcgccttccagcgaaagcaccgcaccatcatcaacgactatatcgccggttagcgccatcgactgcgcccctgccagcacgtagctgccgttttgcgcaatggtgagctgaccagcaccttcgatgatgccagcaaaactgccctgattaacagtaacgttgccaccagcatcgatatttaaagtgccattctgaaagcccgtcaatgcgtgcacaaaagtttgttgggtcgagccaacgtttagctcagcctgattctgatactgatcaatactccctatcgtcagaccgtagcagtcttgcggatcgtcctggcaatgcgtatcgccgacattcatcagggagttgctgcggcccagggtaacttcaccgttttcaatctgcatctcaccagtaaagtcattgttatctgcattaagtaccagatcgccggaacctgttttggtgattaacccggtaccagcaatagagtcaacagctccgtcattctctgtattgccaataaccagcgtttttccgtcggcaatatcaaaggtaacttcacttaagccgagatacataaagccacccgccgcagaggaaggaccatctccatagcctgctgcgctattgttctcatcgactaacacgcctccgttctggctgtagctgtcatcaacagaaatatcaataagatagggagccgtcacgctattggtatatatcgccccgccataaccttcggcagtgttatttgtaaaggcagtgttatttactatcgtataacctgaaggatgcttgctgtcgctattattatcggtaacatcgattgccccgccatcgccatcactgtaacttgttgatgtatatgcctggttgttatcaaaaataacatcacttaaataaacgtcattattaatggtataaattgcgccacctttgccatcattagcgatgttattgcgaaacatggcgttagtgacacgtaaatcgacggcaccagtatcgttagtaccagaagaatagattgcgccaccatagccgcctgcgacgttaccggaaaaaataacatcagtaagattcagcgttgagttttctttagcaaatatggccccgccgttattatattctcctgtaacggtgttattggcaaacagagtcattccagtttcattttctggtaatagtgaaaattccgctccttgttgcaaaaatacggccccaccgctggcgttattggtcatatccgaaaaaaccagccattgcccatcagcgatactccagtcctgcgtaatgcctgaaaggctttgcctgctggcctgacaactcgctttgacatcatatccctggcatgaatcagtgaccgccgcgacaccgttagcagagaaaagagatgcaatcattgacgggagtaaagataaatactccttgcgtagaaagataatccgcatattaatctaaccatcattttctataagacggcgtatttaatcgcattatacgatatggaatatctttcttttgtaaattgttcaacccggtgcaatggctattttgttattatttgatgaataatatcagtgcgtcataattcaagttaataaccttcagggatatcagttatatttaaactaaattaaagtcatgaataattttcttataatataaggtaaattaacaaaatggcttagcatttaacaataaccgaatagaaaacaaccatttcgccatcaacaatctcttacattcgcttatatattgaccacaactgatacatcagattatgtgatgactcgtgcttagatcaatttttgcaatcattagcaaaaagattaataagccatctatatcaatttatctaacctattatgccgttcaagaaatcgccgaacagttatttttaacaaatttttctcttcccattgactttcccggacaccttgtctgacctaaggtgcgcgaaagccactttttccttcctgagttatccacaaagttatgcacttgcaagagggtcattttcacactatcttgcagtgaatcccaaacataccccctatatatagtgttctaagcagcttcccgtactacaggtagtctgcatgaaactattgcggaaagaattccaaaaacaggtacgacatacatgaatcagaatctgctggtgacaaagcgcgacggtagcacagagcgcatcaatctcgacaaaatccatcgcgttctggattgggcggcagaaggactgcataacgtttcgatttcccaggtcgagctgcgctcccacattcagttttatgacggtatcaagacctctgacatccacgaaaccattatcaaggctgccgcagacctgatctcccgtgatgcgccggattatcagtatctcgccgcgcgcctggcgatcttccacctgcgtaaaaaagcctacggccagtttgagccgcctgcgctgtacgaccacgtggtgaaaatggtcgagatgggcaaatacgataatcatctgctggaagactacacggaagaagagttcaagcagatggacacctttatcgatcacgaccgtgatatgaccttctcttatgctgccgttaagcagctggaaggcaaatatctggtacagaaccgcgtgaccggcgaaatctatgagagcgcccagttcctttatattctagttgccgcgtgcttgttctcgaactacccgcgtgaaacgcgcctgcaatatgtgaagcgtttttacgacgcggtttccacatttaaaatttcgctgccgacgccaatcatgtccggcgtgcgtaccccgactcgtcagttcagctcctgcgtactgatcgagtgcggtgacagcctggattccatcaacgccacctccagcgcgattgttaaatacgtttcccagcgtgccgggatcggcatcaacgccgggcgtattcgtgcgctgggtagcccgattcgcggtggtgaagcgttccataccggctgcattccgttctacaaacatttccagacagcggtgaaatcctgctctcagggcggtgtgcgcggcggtgcggcaacgctgttctacccgatgtggcatctggaagtggaaagcctgctggtgttgaaaaacaaccgtggtgtggaaggcaaccgcgtgcgtcatatggactacggggtacaaatcaacaaactgatgtatacccgtctgctgaaaggtgaagatatcaccctgttcagcccgtccgacgtaccggggctgtacgacgcgttcttcgccgatcaggaagagtttgaacgtctgtataccaaatatgagaaagacgacagcatccgcaagcagcgtgtgaaagccgttgagctgttctcgctgatgatgcaggaacgtgcgtctaccggtcgtatctatattcagaacgttgaccactgcaatacccatagcccgtttgatccggccatcgcgccagtgcgtcagtctaacctgtgcctggagatagccctgccgaccaaaccgctgaacgacgtcaacgacgagaacggtgaaatcgcgctgtgtacgctgtctgctttcaacctgggcgcaattaataacctggatgaactggaagagctggcaattctggcggttcgtgcacttgacgcgctgctggattatcaggattacccgatcccggccgccaaacgtggagcgatgggtcgtcgtacgctgggtattggtgtgatcaacttcgcttactacctggcgaagcacggtaaacgctactccgacggcagcgccaacaacctgacgcataaaaccttcgaagccattcagtattacctgctgaaagcctctaatgagctggcgaaagagcaaggcgcgtgcccgtggtttaacgaaaccacttacgcgaaagggatcctgccgatcgatacctataagaaagatctggataccatcgctaatgagccgctgcattacgactgggaagctctgcgtgagtcaatcaaaacgcacggtctgcgtaactccacgctttctgctctgatgccgtccgagacttcttcgcagatctctaacgccactaacggtattgaaccgccgcgcggttacgtcagcatcaaagcgtcgaaagacggtattttgcgccaggtggtgccggactacgagcacctgcacgacgcctatgagctgctgtgggaaatgccgggtaacgatggttatctgcaactggtgggtatcatgcagaaatttatcgatcagtcgatctctgccaacaccaactacgatccgtcacgcttcccgtcaggaaaagtgccgatgcagcagttgctgaaagacctgctcaccgcctacaaattcggggtcaaaacactgtattatcagaacacccgtgacggcgctgaagacgcacaagacgatctggtgccgtcaatccaggacgatggctgcgaaagcggcgcatgtaagatctgatattgagatgccggatgcggcgtaaacgccttatccggcctacggctcggtttgtaggcctgataagacgcgccagcgtcgcatcaggctccgggtgccggatgcagcgtgaacgccttatccggcctacggctcggatttgtaggcctgataagacgcgccagcgtcgcatcaggcacaggatgcggcgtaaaatgccttatccggcattaaactcccaacaggacacactcatggcatataccaccttttcacagacgaaaaatgatcagctcaaagaaccgatgttctttggtcagccggtcaacgtggctcgctacgatcagcaaaaatatgacatcttcgaaaagctgatcgaaaagcagctctctttcttctggcgtccggaagaagttgacgtctcccgcgaccgtatagattaccaggcgctgccggagcacgaaaaacacatctttatcagcaacctgaaatatcagacgctgctggattccattcagggtcgtagcccgaacgtggcgctattgccgcttatttctattccggaactggaaacctgggtcgaaacctgggcgttctcagaaacgattcattcccgttcctatactcatatcattcgtaatatcgttaacgatccgtctgttgtgtttgacgatatcgtcaccaacgagcagatccagaaacgtgcggaagggatctccagctattacgatgagctgatcgaaatgaccagctactggcatctgctgggcgaaggtacccacaccgttaacggtaaaactgtgaccgttagcctgcgcgagctgaagaaaaaactgtatctctgcctgatgagcgttaacgcgctggaagcgattcgtttctacgtcagctttgcttgttccttcgcatttgcagaacgcgaattgatggaaggcaacgccaaaattattcgcctgattgcccgcgacgaagccctgcacctgaccggcacccagcatatgctgaatctgctgcgcagcggcgcggacgatcctgagatggcggaaattgccgaagagtgtaagcaggagtgctatgacctgtttgttcaggcagctcaacaggagaaagactgggcggattatctgttccgcgacggttcgatgattggtctgaataaagacattctctgccagtacgttgaatacatcaccaatatccgtatgcaggcagtcggtttggatctgccgttccagacgcgctccaacccgatcccgtggatcaacacttggctggtgtctgataacgtgcaggttgctccgcaggaagtggaagtcagttcttatctggtcgggcagattgactcggaagtggacaccgacgatttgagtaacttccagctctgatggcccgcgttaccctgcgcatcactggcacacaactgctgtgccaggatgaacacccttcccttctggcggcgctggaatcccacaatgtggcggttgagtaccagtgtcgcgaaggttactgcggctcctgtcgcacacgcctggttgcaggtcaagttgactggattgccgaaccgttagcctttattcagccgggggaaattttgccctgttgttgccgggcaaaaggcgatattgaaatcgagatgtgaattggttgtagtgccagatacaacgcttatgcgtcttatctggcctacaacgattacatggcgtagtaatacgctttcacctgctcccagtccgctttggggattggctccagatatttttccagctggcggaagtcatgattaatcgctttatcgcgacgcaagcggcgacgacttttctccaggtcaagaaaaccagcttctgcattaccttctgttttcacatagatatggcgaacataacaacagccatgctgacgattaatgctatgcattttcttaaacgccagcgccactgctttcaacatggcttgccgtacttcgtcagaataaggcgatactgcatgctgggcataccagtcagcaatgctgatgaaccccgccatatcttcagtcaccagcaacgctcgccattcaccctcaattttcaccgcttcaccaaaaacgatcttcggcacgatgacaccggcccgttccagttctttaattaccgcaacctcacggacaatcgttggtcggccgaacggataacgtacggaatgaaacagatgatgcgtcatgcgctttacatacagctttttgccgttgcgctcgacgcattgcaccccgctcataccattacggcgatagttaggctcttcaacccagtcgccctctgttgcccaccagtgattaaattcgtcgtactttgctgaaactgccataccctatcgcctgtcatttttattaacgacaatgactataggtggttacctgaggaaaatcttaatgaaacgtgtcgtattaatgaatttcttttgccactactagcttgacaccgcttttacccttcatttgcagcgcatagattccaccagccactaccactaatagtgcgcccagcagataaaatgtgaatttaatcaggcggatacagcgatgaattttattcgacagggattaggcatcgccttacaaccagagttaacgctgaaaagcattgcaggtgaattgtgttccgttcctctcgaaccaactttctatcgacagatttcgttgctggctaaagaaaagccggtagaaggcagtccactgtttttactacaaatgtgcatggaacaattagtggcgattggaaaaatttgatatgagacaggatggcgcatgaacgccatcctgcagtaacattactctttattaagaaattttactgccttatcagggaaatcagtaaacagcccatttacacccgctttgttatacagagcatcatataactgattcacatcaggagtgtattcaggcagtttatctgaccgcacggtataaggatgcactaccagtttattctgctgagcatcttgcaccatgccagtgagtttgatattacccggctgcgatgtctcctcaatcaacatatggtaatccggaccaataccatctgcatattccgccacctgtttcatggcacccggcttaaacatccagtcgtagttgtaattaacccagcttccatccggctgtttctgctgcgtttcattccagtcggtataggcaatcagctgtaccagattgagctccatgcccattttgggttccagctcattcttaatacgcttcagctcatcagcatcaaaacattgcaaataaactttatcgtctttaccggtgtaaccatatttcttcagcacttccagcgtttttgccgcaatatccttcccttcctgatgatggaaccacggcgctttgatttctggataaataccgatatttttcccggtagagtgatttaacccctgaacaaattcaatctcttcttcaaaggtgtgcacccggaagtcggacttacccattgggaaacgccccggataagtctgcacttttttaccgttttcaatatcgaaaccttcggtaaatttcaacgacttaatttcatccagcgtgaaatctatcgcgtagtaacgaccgtctttgcgcgcccgatccgggaaacgatcggcaacatcagtaacacgatcgaggtaatggtcatgcagaacaaccagattgtcgtctttggtcatcaccaaatcctgttccagataatccgctccctgcgcatacgccatcgcttttgctggcagcgtatgctccggcaaatatccactggcaccgcgatgggcgatgactattttttcgttgctgtccgccgccattgcactgcttcccatgactatagtgctcatcatgatcgccatgctaaggtttttcagcgtcaatttcatgccattagcctccgttgcgttcttgcagtaattgttcatggcgacgtttttcgccaatcatcacaacaatcaacaagataaccgccagaatgctgccgccaatcattaccataaagccgccatcccagccgaagaagtccacggtgtagccaacaatcgcgctcgccgccaccgaaccgcccaggtaaccaaacagcccggtaaagcccgctgccgtacctgccgcttttttcggtgccagttccagcgcatgcagaccgatcagcatcacaggaccgtagatcaggaagccgataacaatcatacaaatcatatcgacggttgggttacctgccgggttcatccagtaaacgatagtcgcgatggtcaccagtgtcataaagaaaacgccggttgccccacggttgccacggaagactttatccgacatccagccgcacagcagagtgcccggaatacctgcatattcataaaggaagtaggcccaggaggatttatctagcgcgaaatgcttaacctctttcagataagtcggtgaccagtcgaggatgccgtaacgcagcagataaacgaacacgttggcgatggcgatataccacagcagtttgttcggcagtacgtactgcatgaagatttgcttcgccgtcagctcctgttccgctttttcgttatagtcgtccggataatcatttttgtactcttcgatcggcggcaagccacaggattgcggggtatcgcgcatcatcgcaaaggcgaataatgccaccagaatggcgcagaaagcaggcatatagagcgccgcatgccagtcattgaaccaggccatccccagcaggaacagcagcggcggaataccaccaccgacgttgtgcgcacagttccacactgacacaatgccgccacgttctttctgcgaccaccagtgcaccatagtacgaccacacggcggccaccccatcccctggaaccaaccgcagaggaacaacagtacaaacatcaccgcaatgctcgacgtcgcccatggcacaaagcccataaacaacatcactgccgccgccagaatcaaacctgcgggcaggaaaacgcgcggattcgagcgatccgataccgaacccatgatgaatttcgaaaatccataagcaatcgagatccccgaaagggcaaaacctaaatcaccgcgtgagaatccctgctcaaccagataaggcatagcaagcgcaaagttcttacgaaccaaatagtaagccgcatagccaaagaatatccccaggaaaatttgccagcgcaatcgacgataagtcggatcgatctccgcggcaggtaagcgcgctttgtgtggcgctggtttaaaaatactcaacattgatagcctccgtggcccgtggtcttatttatgattaacagcctgattcagtgagagaacctgccgtttcttgagttgccgcgatgttaagaaaacattcataaattaaatgtgaattgccgcacacattattaaataagatttacaaaatgttcaaaatgacgcatgaaatcacgtttcactttcgaattatgagcgaatatgcgcgaaatcaaacaattcatgtttttactatggctaaatggtaaaaaacgaacttcagagggataacaatgaaaactcgcgactcgcaatcaagtgacgtgattatcattggcggcggcgcaacgggagccgggattgcccgcgactgtgccctgcgcgggctgcgcgtgattttggttgagcgccacgacatcgcaaccggtgccaccgggcgtaaccacggcctgctgcacagcggtgcgcgctatgcggtaaccgatgcggaatcggcccgcgaatgcattagtgaaaaccagatcctgaaacgcattgcacgtcactgcgttgaaccaaccaacggcctgtttatcaccctgccggaagatgacctctccttccaggccacttttattcgcgcctgcgaagaagcagggatcagcgcagaagctatagacccgcagcaagcgcgcattatcgaacctgccgttaacccggcactgattggcgcggtgaaagttccggatggcaccgttgatccatttcgtctgaccgcagcaaacatgctggatgccaaagaacacggtgccgttatccttaccgctcatgaagtcacggggctgattcgtgaaggcgcgacggtgtgcggtgttcgtgtacgtaaccatctcaccggcgaaactcaggcccttcatgcacctgtcgtggttaatgccgctgggatctgggggcaacacattgccgaatatgccgatctgcgcattcgcatgttcccggcgaaaggatcgctgctgatcatggatcaccgcattaaccagcatgtgatcaaccgctgccgtaaaccttccgacgccgatattctggtgcctggcgataccatttcgctgattggtaccacctctttacgtattgattacaacgagattgacgataatcgagtgacggcagaagaggttgatattctgctgcgtgaaggggaaaaactggcccccgtgatggcgaaaacgcgcattttgcgggcctattctggcgtgcgcccgctggttgccagcgatgacgacccgagcggacgtaacgtcagccgtggcatcgtgctgctcgaccatgctgaacgcgatggtctggacggatttatcaccatcaccggtggcaaactgatgacctatcggctgatggctgaatgggctaccgacgcggtatgccgcaaactgggcaacacgcgcccctgtacgactgccgatctggcactgcctggttcacaagaacccgctgaagttaccttgcgtaaagtcatctccctgcctgccccgctgcgcggttctgcggtttatcgtcatggcgatcgcacgcctgcctggctgagcgaaggccgtctgcaccgtagcctggtatgtgagtgcgaagcggtaactgcgggtgaagtgcagtacgcggtagaaaatttaaacgttaatagcctgctggatttacgccgtcgtacccgtgtggggatgggcacctgccagggcgaactctgcgcctgccgcgctgccggactgctgcaacgttttaacgtcacgacgtccgcgcaatctatcgagcaactttccaccttccttaacgaacgctggaaaggcgtgcaacccatcgcctggggagatgcactgcgcgaaagcgaatttacccgctgggtttatcagggattgtgtggtctggagaaggagcagaaagatgcgctttgatactgtcattatgggcggcggcctcgccggattactctgtggcctgcaactgcaaaaacacggcctgcgctgtgccattgtcactcgtggtcaaagcgcactgcatttctcatccggatcgctggatttgctgagccatctgccagatggtcaaccggtgacagacattcacagtggactggaatctttgcgtcagcaggcaccagcccatccttactcccttctcgagccacaacgcgtgctcgatctcgcttgccaggcgcaggcattaatcgctgaaagcggtgcgcaattgcagggcagcgtagaacttgctcaccagcgggttacgccgctcggcactctgcgctctacctggctaagttcgccagaagtccccgtctggccgctgcccgcgaagaaaatatgtgtagtgggaattagcggcctgatggattttcaggcgcaccttgcggcagcttcgttgcgtgaactcggccttgccgttgaaaccgcagaaatagagctgccggaactggatgtgctgcgcaataacgccaccgaatttcgcgcggtgaatatcgcccgtttccttgataatgaagaaaactggccgctgttacttgatgcgcttattcctgtcgccaatacctgcgaaatgatcctgatgcccgcctgcttcggtctggccgatgacaaactgtggcgttggttgaatgaaaaactaccttgttcactgatgcttttgccaacgctgccgccttccgtgctgggcattcgtctgcaaaaccagttacagcgccagtttgtgcgccagggtggcgtgtggatgccgggcgatgaagtgaaaaaagtgacctgtaaaaatggcgtagtgaacgaaatctggacccgcaatcacgccgatattccgctacgtccacgtttcgcggttctcgccagcggcagtttctttagtggcggactggtagcggaacgtaacggcattcgagagccgattctcggccttgatgtgctacaaaccgccacgcggggtgaatggtataagggagatttttttgcgccgcaaccgtggcagcagttcggtgtaaccactgatgagacgctacgcccgtcacaggcagggcaaaccattgaaaacctgtttgccatcggttcggtgctgggcggatttgatcccatcgcccagggatgcggcggcggtgtttgtgccgtcagtgctttacatgccgctcaacagattgcccaacgcgcaggaggccaacaatgaatgacaccagcttcgaaaactgcattaagtgcaccgtctgcaccaccgcctgcccggtgagccgggtgaatcccggttatccagggccaaaacaagccgggccggatggcgagcgtctgcgtttgaaagatggcgcactgtatgacgaggcgctgaaatattgcatcaactgcaaacgttgtgaagtcgcctgcccgtccgatgtgaagattggcgatattatccagcgcgcgcgggcgaaatatgacaccacgcgcccgtcgctgcgtaattttgtgttgagtcataccgacctgatgggtagcgtttccacgccgttcgcaccaatcgtcaacaccgctacctcgctgaaaccggtgcggcagctgcttgatgcggcgttaaaaatcgatcatcgccgcacgctaccgaaatactccttcggcacgttccgtcgctggtatcgcagcgtggcggctcagcaagcacaatataaagaccaggtcgctttctttcacggctgcttcgttaactacaaccatccgcagttaggtaaagatttaattaaagtgctcaacgcaatgggtaccggtgtacaactgctcagcaaagaaaaatgctgcggcgtaccgctaatcgccaacggctttaccgataaagcacgcaaacaggcaattacgaatgtagagtcgatccgcgaagctgtgggagtaaaaggcattccggtgattgccacctcctcaacctgtacatttgccctgcgcgacgaatacccggaagtgctgaatgtcgacaacaaaggcttgcgcgatcatatcgaactggcaacccgctggctgtggcgcaagctggacgaaggcaaaacgttaccgctgaaaccgctgccgctgaaagtggtttatcacactccgtgccatatggaaaaaatgggctggacgctctacaccctggagctgttgcgtaacatcccggggcttgagttaacggtgctggattcccagtgctgcggtattgcgggtacttacggtttcaaaaaagagaactaccccacctcacaagccatcggcgcaccactgttccgccagatagaagaaagcggcgcagatctggtggtcaccgactgcgaaacctgtaaatggcagattgagatgtccacaagtcttcgctgcgaacatccgattacgctactggcccaggcgctggcttaaactcctttctgatgcccggtaagcatgtggttaccgggcatttttgcgtacacgattccgtgcccaatgtatgcgttgcaacgcagtgaaaattcctctgaaaacgtctcgcaaaggctgaaactggcagatgtcaaaggcctgggataaccgtaatgtcgcgtcatcataaatatcaggtgacggacaaccatgaccgaatcaacaacctcctccccgcatgatgcggtatttaaaacctttatgttcacacccgaaaccgcacgggattttctcgaaatacatttaccagaaccactgcgcaagctttgcaacctgcaaaccttacgcctggaacccactagttttattgaaaaaagtttacgcgcttactactcggatgttttgtggtccgtggaaaccagcgacggtgacggctatatctactgcgtgattgaacatcaaagctctgcagaaaagaatatggcttttcggctaatgcgctatgccactgccgccatgcagcgtcaccaggacaaaggctatgacagagtcccgctggtggtgccgttgctgttttatcatggcgaaacctcgccttacccgtactcactcaactggctggatgagtttgacgatccgcaacttgcccggcagttgtacaccgaagcttttctgttggtggatatcaccatcgtacctgacgatgagatcatgcaacatcggcgtatagctctgctggaactgattcaaaagcatattcgcgaccgcgatttaatcggcatggtcgacaggatcaccacgcttttggttagaggcttcactaatgacagccagctacaaacactgtttaattatctgctgcaatgcggcgatacctcccgtttcacccgttttattgaggagattgccgaacgttcaccactacaaaaggagagattaatgactattgctgaacggctacggcaggaagggcatcaaattggctggcaggaaggtatgcatgaacaagccattaaaattgctttgcgcatgctggagcagggctttgaacgtgagattgtgctggcgacaacccaactcactgatgctgatattccgaactgtcattaaaaggagagattaatgactattgctgaacggctgcggcaggaaggacatcaaattggctggcaggaaggtaaattagaaggtttgcatgaacaagccattaaaattgctttgcgcatgctggaacagggctttgatcgtgaccaggtgctcgcggccacccagctaagcgaagccgatctggcagcgaataaccactaattaacacaggcccacagccgatccccatgggcctttgatatcaataactaccttttatgcgtggcccatttttgcctgatttaaacatcgccagtcgttgatccagggcatcgctgtagagcatcgtgtcaacgccaacagcgacaaagttcgctccccacgccaggcattgctgcgccatatcaggagccacagccagaaaaccagccgctttacccgcagcacggatccgccgaatactggtttcaataattcgctgcacttccgggtgcccggcgttatccgggtagcccaacgacgcagaaagatccgcaggtccaataaacacgccatcaatcccttcgacgtcgaggatttcgtccaggttatccagtgccgttttactttccacctgcaccaacagacaaagcgaatcgttaacttgcgccatgtaattctcaatgcgtccccagcgcgcagcccgtgccacactggccccgacaccacgctcaccgtagggaggatagcgcgtggcagacaccacctgacgtgcctgttcggcagtatcgaccatcgggatcagtagagtttgcgcgccaatatccaggacttgtttaatcagcggtttactgccttccaccggacggatcacgggttggctggcatagggcgctaccgcctgtagctgatgataaagatcctgaatggtgtttggcgcgtgctccccgtcaatcagcaaccagtcataaccagaagtggcggcaatttctgccatataggcagtcgttgagcttaaccacagaccaatttgcacttcgcccttgcgtaaacgttctttaaagggattgcttaataatgcgttcatcgtgttccttaacctatttaatgatgtgccacgtcggtctgcgcaacagtgcgatttacacgcagagtgaaaataatcagcgaaccgatgaccgccaccgctgccagcgtcagtaatcccgccgcatcgctggcaaataacgtttctgctttcacgcgcaggatcggggcaataaacccgcccactgcaccaaacaggtttacaaaaccaattcccgcagccagcgccgtaccggaaagcagttgtgtcggcatcgtccagaacactggctgcacggcaataaacccgatagctgcaacacacagcgctacgatcgccattactggagaaagcagcccggacagaccaataccaatgcccgccgccagtaatgtcagcgctgcgacattacgccgttcgccggttttatcggaatagcgcggaataagccaggtcccaaacaaggccgcaacccacggaatggcggtgaccaccgacgctgtaaagcccacttttgttcccagcaatgccgcaacctgggtcggcaggaagaaaattaatccgtaaaccgccacctgaatggtcaggtagataatcgctagttgccagactcggccattacgcagcgcatcgctcagccgagaagtcactttctgttgttcttcacttgccagttgattgataagcaacgttttttcttgtttactcagaaaacgtgcctgctccggtgtgtcatcaagccaaaagaatgtgaataccccagcaccgactgccaacaatccttcaatcacaaacatccagaaccagccgggatgccccataaatccatgcatctccaacagcgcgccggaaagcggtgatcccagtgttaacgccagcggtgcgcccatatagaacagccccataatgctggcgcgattacgctgcggaaaccattgcgaggtgagataaatcataccagggaaaaatccggcctccgcagcacgaagcagagtgcgaactatcagaaatttcgcttcagtatcggcccatgccatggctgccgaaagaaatccccacagcagtgttgtcgtaccaatccaggttctggcccccagtttgcgcatcaaaagattcgccggaacacccagaaacgcatataccacaaagaaaatgcctgctcccagcgcataagcttcattactcaacccggtatcaatctggtaggtctgtttggcaaaaccgatattcgaacggtcgagaaacgccagcacatacagcgccaacataaacggaattaaacgcacacggtttttcttcaccacggcgtcaagcaaagcggtgctcataaaaagctccttagaatatgtgggcgttaccgttgtcacagcaacgcccggagtgattagtggctgtaggggcgtttcaaattgcagtcacgattgagttcgacgccaaaaccgggtttatcaagcactgatttatgaatacgaccattcaccggaaccggctcattgagcagaatcgggtcaaactgcggacgcatcgttgaacaatccgggctggtcatcaggaattcgctgaatggcgtattggtgaaggtgatcaccgcatggtgagagtaaacagacgaaccgtgcggcaccaccagttgccccctggatttggcgattgcggcaatttccaccagcgtggttaaaccaccgcaccagccaacatccggctgcataatgtcgataccggtttctgaaagcgtacgaaaagattgcagtgtgccgtggtgctcaccgctggtgaccatcattccgactggcgcgttgcgtttcagttcgcgataactttcatactgctgtggcggcaggcactcttcgatccatttcaggttatagggcgcgcaagcgtgggccagtttggtcgcatagttcacgtcctgactcatccagcagtcgagcattaaccagaaatcctcaccgcatttttcacgcatatccgcgaccatagcggcatctttgcggatccccgcatcgccatcatgtggcccccagtgcgtcggcattttgccaccgataaagcccatctcttttgccagatccggacgcgcacctgtggcgtagaactgaatctcatcacgaacagcgccgcctaaaagtttataaaccggaagcccgaccactttgccgaacagatcccacagagccagatcgacacaagaaatcgtattcatcaccaggccaccagagccggagtaatacagggtggcactgagcatttgatcgtggatcagtttgatatcactgacacatttaccctcaatgaaacggttaagatgtttttcgacaataaaacagcccatttcaccggctgtcgaaacggcgaatccggtctggccgttttctgcttcgacttcaacaaccaacgtgccaagaacgttaatgccaaatgactggcgtgactgctcgtaatcgcggtatttactcatcggggtggcaatatgatcgtctatccagtgattcgccccctggtcgtgataatcaccgccgccagcgcctttttctgctgtcgcaccgccagtaaaccaggcgcgaacctgtttaatttttggtagggtcatgatgttctccattgttatgaggcttgtaagtcaaagggacttttccatcccaacagacgtgaaatatccctggcgcaggcaatggccttgcccgccagataatcacggtattcttcattgatttgtaagcgggtaccgaccaccgagatcgcagcggtaagctcgttattggcgttaaacaccggcgcagcgacacaacggacatcggcgtaatcttcgccgttgtcatagctccagccctgacggcgaatacgcgccagttcttcgtgaagttgctgtggatgagtaatcgttgtgggtgtcgcctgctcccagaccagcccttcgataatactttgctgtaccgctgcaggttgccaggcaagcaggcatttacctattccggagcgataaagcgaaaggctttttccttcatgggaacgcacgctgatagtggctgatgactccactttcaaaatgtaataagcgctgccgttatcaataatccccaggtgacataacagcccggtggtatccatcagttgcgtcaaacgcggtcgagccagttcccggagatccatcttgcttaacgcatgaccggaaagctccaccagcctggtccacaaacaaaaattttcctggtgatcaaggctaagaaaacgctgacgcctgagttcattaagcagcaaataggccgtgcttttagggattcccaatgtgtcaatgatcgtcgcagcactacaggggccaatgcgggcaatcaaattgagaatatcaatagcccgtgtcagggcgggaactttgcttgattccaacatactggactccagtcttagatactggaatcagtctcgttgctcagggggagtaaaattgtgaagcgcatcaaatcccgctcctcgtccagcagactggagaaattacgcacaaatttgtgaatcagcgcacggattttttcttattgagtacaacaggttggacaaattttgccggagggggaatgtgccggtgcagtaaaccggcacagagtggcggaatcagacagataaggtcatggactcaacaacctcaatccagccatgctcactggcgatatcctggccgtttaaccaacggcgcagcatattcagtgccatcattgcgcacacttcctgacggatagccaggctgtagcgcgtagtgctgaaacgcacacgcagagcgaaagtgccgtctggcgtggctagcgcaaagttgagatgctcgttctcgaaacccgaaacagccagtgccagcccggcaaaatggttggcccgccgttctgtaatccagtgcgcagtttgcgccagggtttcctcctgtgaaggaaccacttcacacgccagcaatggagcacctgcgcgagaaagttgcaaagccaataaaccaccggtgaattgctcgctcaacgtcaggctgaactggcggttttgcaattcgcgactgatctgcgcgggcagtccttcagtgccttcgaaaatcacgctctgtccggcaacacgtttaacatccagccacagtttttccatcgcctgttgctcgcttgccggtccggtgagtttcagttcgatgataggcattgaggagcgatagcccattgttacgcccggcggcagttgtagagtgtccaggctttgtgccagatcgctttccgaacgaccaaaagtagtcaaacgcagacaaaccggcggctgcggtaaagaaaaacgctcgcgcaggcgcggcaggatttcgtgctcgaccatcaccttaaattctgacggtacgccgggagtaaagaacatcaggcaacgattaagctgcacggcaaaaccacaggcggtgcctaccgggttattgataaattcagcactggcaggcagctccgcttgtttacggttgctcggtgccattactcgtccacgttcgtggaaatagcgttccatctctttgagccaggcttcatgcagcaccaggccttcaccttttgctgtcgcagcggcgagtgcgcttaaatcatcgctggtcggtcccagcccgccgttaacgatcagcacatcggcgtgctgactacgttcgcgaagaatggtgactaagtcatcaaggttatcccccaccgtattgcggcgagataatggcaacccctgatgaaagaaaaaatcggccagccaggcagcgttagtgtcaacgatttgcccgtgtaacacttcatccccggtggataacatttccacttttaacatggttatctcctgcttttgttatcgaatcactataacgcaaagggagataaggcgtagtaagaaactgaatggcgcgacagaatgccgcgccggaagggatcagaaactggcgttaaccccaacatacgggccgtcagccacggcgttgtcgcggttaccgtctttacccgacagattcaggtagcgataacccgcctcaatactgactggacgcataatggtgtaacgcgcgccagcattcgcttcttcataactttgaataccgctggagagcgaatccggagagtagtaatactcgccaaacaaacggaagctgttgccaattttccactgcaaaccacctcctaccgctgcggcataaccttcatcgccgtaattcgggttggtgtaaacgccttttccgccaacggtcgccattaacggcccgagaggcagattcaaccccagccccacgccagcgacatcaccgtcgtcgtcgttatgtgtccagttaccgcttaacgccaggcccgtcgtttcagtcccaaaaccgacaccaatattggtgtattctttacccgcctgaccgctgatgctcattgcattgaccgatgcagaaaccaacagcattccggccagacctgctagcgcaatttttttcattatcccctttcccacaagcaattaatcaaaattcccaaagctgcgggattgtactgcctggcacagaggattcaatgagcgaaaaaaaggatctagtcacttattgtaactaaatacttcttaaataattaaatgccgaaaaaataaacacactttatcgatacacacaaaaataataataagtacagttatcatcgcaaaagagattactgtcactttcacatatttgtgagttaccgtattctcatggtttctttttatttataaggaatatccctgtgcgacaacggactattgtatgccctttgattcaaaatgatggtgcttatttgctgtgtaaaatggccgacgatcgcggcgttttccccggtcaatgggcgatttcgggtggcggcgtggagcctggcgaacgaattgaagaggcactacgccgcgaaattcgcgaagaactgggagaacagctgcttttgacagaaatcacgccgtggaccttcagcgatgatattcgcaccaagacgtatgcagatggtcgcaaggaagagatttatatgatttacctgatttttgactgcgtttctgccaaccgagaagtgaaaataaacgaagagtttcaggactacgcgtgggtaaaacctgaagatctggtgcattatgatttgaatgtcgccacccgaaaaacgttacgtttgaaaggtcttctgtaacaatgatgacagccattactggctgtcagattgaaaatttagtggttaacgaattccccatccagataaactttgcctttttccacatgcatgactaaaccatccagataatcaggtttaaatgtcgcgtcacgcttatctttagcaatatatgtcaggcaatgattatgggtgaaaataacgatatttttatcaggcgctttgctttgtaagtccttaattgcactataaatctcattaccgcactgaagaagtcgtttatctaccgtcaattttttacccgctgaaaaccaggtagccgactgaatggtccggacggtattactggaataaagatcgaaatcagggatatcagcactaaaagcgttgcccagttcacgggcatcctgggtacctttaaccgtaatacctgttttatctgacaagcattgattggttgaacggtcgcaacgttcagcatgacgaaacaaaacgacaaccgggtgctgctgtgccagtctggccagtgttttattgtcgatacgtggcaaaccattgctactccaggcggcatgagtacccagtccggcaattgcagcgagcgccagtaaaatgatgatatatttttttgacttcaacgaagagcggcaaaaagctaacacgtaaactccacctatagacaagcgcaaccagacaattaccgtgaaattgagctacatttctggcgataattcgcagttggtgtaatattaaaaatcctacgatgtcggcaaaatgcctcaaaattttgccaaatgcaaagcctaaataagaaaaaatataaaaatttcaatatttacgtctaatattagtttcttaaggttaagttaatattctatccttaaaatttcgctccaaatggcaaaatatacacaacactctttatagcaaatataagtggacaggtattcaatggcggaaggaaaagcaatgtcagaatttttgcctttttcgcgaccagcaatgggcgtggaggaactcgctgcagttaaagaggttctcgaatccggttggatcacaaccggtccgaagaatcaggcgcttgagcaagctttttgccagttgacgggaaatcagcatgccatcgcggtcagttcagccaccgccggaatgcatatcacgctaatggcgttgaaaattggcaagggcgatgaagtgattacgccttccctgacctgggtttcaaccctcaatatgatttccttgttgggtgcaacgccggtaatggtggatgtcgaccgcgatacgctgatggtcacgcctgaagctatcgagtcagccattacgccacgcactaaagccatcattccggtgcattatgccggtgcgccagcagatattgacgccattcgcgccattggcgaacgttacggcatcgcagttatcgaagatgctgcccatgccgtcggtacgtattacaaagggcgacatattggcgcaaaaggtaccgctattttttcatttcatgccattaaaaatattacctgtgctgaaggtggcctgattgtaactgataatgaaaaccttgcccgccagctacggatgctgaaatttcacggtctgggtgtcgatgcctatgacagacaaacctggggccgtgcaccgcaggctgaagtcttaacaccgggctataagtacaatctgaccgatattaacgccgcgattgccctgacacagttagtcaaattagagcacctcaacacccgtcggcgcgaaattgcccagcaatatcagcaagcactggcagctctcccctttcagccattaagccttcccgcctggccgcacgttcacgcctggcatctgtttattattcgtgtcgatgaacaacgttgtggtatcagtcgcgatgcgttgatggaagcgttaaaagaaagaggcattggtaccgggttacatttccgcgccgctcacacacaaaaatattatcgcgagcgttttcccacgctgtcgttaccgaataccgaatggaatagcgaacgcatctgttctttgccgctgttcccggatatgactaccgccgatgccgaccatgtcatcacagcccttcagcaactcgcaggacaataagccatgtttgaaatccaccctgttaagaaagtctcggtggttattcccgtttataacgagcaggaaagcttaccggaattaatcaggcgcaccaccacagcctgtgaatcgttggggaaagagtatgagatcctgctgattgatgacggcagtagcgataattccgcgcatatgctggtcgaagcctcacaagcggagaacagccatattgtgtctattttgcttaaccgcaattacgggcaacattcagcgattatggcgggattcagtcacgttactggcgacttaattattacccttgatgccgatctccagaatccgccagaagaaatcccccgcctggtggcaaaagccgatgaaggttacgacgtggtagggactgtacgccagaaccgccaggacagctggtttcgtaaaaccgcttcgaagatgattaaccggcttattcagcgcaccactggcaaagcgatgggtgattacggttgtatgctgcgcgcctatcgccgtcatattgtcgatgcgatgttgcactgccatgaacgcagcacctttatcccgattctggcgaatatcttcgcccgccgtgccattgaaattccagtacatcatgccgagcgtgagtttggtgaatccaaatacagttttatgcgcctgattaatttgatgtacgacctggtgacctgccttaccacaacgccgctacgtatgctgagtctgctcggcagcattattgcgattggaggttttagcattgcggtgctgctggtgattttacgcctgaccttcggaccacaatgggcggcagaaggcgtctttatgctatttgccgtgctgtttacttttattggcgctcagtttatcggcatgggattactcggtgaatatatcggcaggatctacaccgatgtccgcgcccgcccccgctattttgttcagcaagttatccgtccatccagcaaggaaaatgaataatgaaaaccgtcgtttttgcctaccacgatatgggatgcctcggtattgaagccctgctggctgccggttacgaaattagcgccatttttacccatactgataatcccggtgaaaaagccttttatggttcggtggctcgtctggcggcggaaagaggcattccggtttatgcgccggataacgttaatcatccgctgtgggtggaacgcattgcccaactgtcgccagatgtgattttctctttttattatcgccatcttatttacgacgaaattttgcagctcgctcccgcaggtgcatttaatctgcatggttcgctgttaccaaaatatcgtggtcgcgcgccgctgaactgggtgctggtcaacggtgaaacggaaactggcgttacattgcaccgaatggtgaaacgtgccgatgccggggccattgtggcgcaactgcgcattgccattgcgccagacgatatcgctattacgctgcatcataaattgtgccatgccgcgcgccagctactggaacagacattacccgccattaaacacggtaatattctggaaatcgcccagcgcgaaaacgaagccacctgttttggtcgcagaacgccggatgacagtttccttgaatggcataaaccggcatccgtactgcacaacatggtacgtgccgttgccgatccgtggccgggtgccttcagctatgttggcaatcagaaattcaccgtctggtcgtcgcgtgttcatcctcatgccagcaaagcacagccggggagcgtgatttctgttgcgccactgctgattgcctgtggcgatggcgcgctggaaatcgtcaccggacaggcgggcgacggcattactatgcagggctcgcaattagcgcagacgctgggcctggtgcaaggttcacgcttgaatagccagcctgcctgcaccgcccgacgccgtacccgggtactcatcctcggggtgaatggctttattggcaaccatctgacagaacgcctgctgcgcgaagatcattatgaagtttacggtctggatattggcagcgatgcgataagccgttttctgaatcatccgcattttcactttgttgaaggcgatatcagtattcattccgaatggattgagtatcatgtcaaaaaatgtgatgtcgtcttgccgctggtggcgatagccacgccgattgaatatacccgcaacccgctgcgcgtatttgaactcgattttgaagagaatctgcgcattatccgctactgcgtgaagtaccgtaagcgaatcatcttcccgtcaacttcagaagtttatgggatgtgtagcgataaatacttcgatgaggaccattctaatttaatcgtcggcccggtgaataaaccacgctggatttattcggtatcaaaacaattacttgatcgggtgatctgggcctatggcgaaaaagagggtttacagttcaccctcttccgcccgtttaactggatgggaccacgactggataaccttaatgcagcgcgaattggcagctcccgcgctattacgcaactcattctcaatctggtagaaggttcaccgattaagctgattgatggcggaaaacaaaaacgctgctttactgatattcgcgatggtatcgaggcgttataccgcattatcgaaaatgcgggaaatcgctgcgacggtgaaattatcaacattggcaatcctgagaacgaagcgagcattgaggaactgggcgagatgctgctggcgagcttcgaaaaacatccgctgcgccatcatttcccaccgtttgcgggctttcgcgttgtcgaaagtagcagctactacggcaaaggatatcaggacgtagagcatcgtaaaccgagcatccgcaatgcccaccgctgcctggactgggagccgaaaattgatatgcaggaaaccatcgacgaaacgctggatttcttcctgcgcaccgttgatcttacggataaaccatcatgaccaaagtaggcttacgcattgatgtcgatacctttcgtggcacccgtgaaggcgtgccgcgtctgctggaaatcttgagtaagcataatattcaggccagcatttttttcagcgtcggcccggacaatatgggccgccatctctggcgactggtgaagccacagtttttgtggaagatgctgcgctcaaacgcggcatcgctttatggctgggatattttactggcaggtacggcctggccaggtaaagagattggtcatgccaatgccgatatcattcgtgaagcggctaaacatcacgaagtcggcctgcacgcctgggatcaccatgcctggcaagcccgtagcggtaactgggatcggcaaacaatgatcgacgatattgcacgcggtcttcgcactctggaagagattatcggtcaaccggtaacctgttctgccgctgcgggctggcgtgccgaccagaaggtgatcgaagcaaaagaagcgttccatttgcgctacaacagcgattgtcgtggggccatgccgttccgtccattgctcgaatcaggaaaccctggcactgcgcaaattccggtgaccttacccacctgggatgaagtgattggtcgggatgtgaaagcagaagattttaacggttggttactcaaccgcatcctgcgagataaaggcacgccggtttataccattcatgcagaagttgaaggctgcgcttatcagcataattttgtggatctcctcaaacgcgcagctcaggaaggcgtgacattttgccctttaagcgaactgttatcagagacgttgccgctcggacaagttgttcgcggaaatattgccggacgtgaaggctggctgggttgccaacaaattgcgggtagtcgctgatgaaatcggtacgttaccttatcggcctcttcgcgtttattgcctgctattacctgttaccgatcagcacgcgtctgctctggcaacccgatgaaacgcgttatgcggaaatcagtcgagaaatgctggcatccggcgactggattgtgccccatctgttagggctacgttatttcgaaaaacccattgccggatactggattaacagcattgggcaatggctatttggcgcgaataactttggtgtgcgggcaggcgttatctttgcgaccctgttaactgccgcgctggtgacctggtttactctgcgcttatggcgcgataaacgtctggctctactcgccacagtaatttatctctcattgtttattgtctatgccatcggcacttatgccgtgctcgatccgtttattgcattctggctggtggcgggaatgtgcagcttctggctggcaatgcaggcacagacgtggaaaggcaaaagcgcaggatttttactgctgggaatcacctgcggcatgggggtgatgaccaaaggttttctcgcccttgccgtgccggtattaagcgtgctgccatgggtagcgacgcaaaaacgctggaaagatctctttatttacggctggctggcggttatcagttgcgtactgacggttctcccttggggactggcgatagcgcagcgggagcctaacttctggcactattttttctgggttgagcatattcaacgctttgcactggatgatgcccaacatagagctccgttctggtactacgtgccggtcatcattgccggtagcctgccgtggctgggattactccccggtgcactgtacacaggctggaaaaaccgcaagcattccgcaaccgtctatttgttgagctggacgataatgccgctgctgtttttctccgtcgctaaaggtaaattgcccacctatattctttcctgctttgcatctctggcaatgctgatggcgcattacgctttgctggcagcaaaaaataatcctctggcgctgcggattaatggctggattaacatcgcttttggcgtcactggcattattgccacatttgtggtctccccgtggggaccaatgaacacgccggtgtggcaaaccttcgagagctataaagtcttttgtgcctggtcgattttttcgctatgggcatttttcggctggtacaccttaacaaacgtcgaaaagacctggccttttgccgcgctttgcccgctggggctggcgttgctggtaggattttcaattcctgacagagttatggaaggaaaacatccgcaattttttgtcgagatgacacaagaatcacttcagccaagccgctatattcttactgatagcgtcggtgttgccgcaggtctggcatggagcctgcaacgcgatgacatcatcatgtatcgccagacaggtgagttgaaatacggccttaattatccggatgcgaaagggagatttgtcagcggtgatgagttcgcaaactggcttaatcaacatcgtcaggaggggattattactctcgtgctttcggttgaccgcgatgaagatatcaacagtctcgccattccgcccgcagatgccatcgatcgtcaggagcgtctggtgctgattcagtatcgtcccaaatgatctggctaacattagtctttgccagcttgcttagcgttgccgggcagttgtgtcagaaacaggcaacctgctttgtggcgataaacaaacggcgcaaacatatcgtgctgtggctgggactggcgctggcttgtcttggtcttgccatggtgctctggctgctggtcttgcagaacgtaccggtaggcattgcttacccgatgttaagtctgaattttgtctgggtgacgctggctgcagtaaaactgtggcacgaaccggtatcgccgcgtcactggtgtggggtggcgttcattattggcggcattgtgatcctcgggagtacggtgtaatgggcctgatgtggggattattcagcgtcattattgcctcagttgcgcaattaagcctgggttttgcggcgagtcatctgccgccgatgacgcacttatgggattttatcgcggctctgttagcttttggcctggatgcccggatactgttactcgggctgctgggttatctgctttccgttttttgttggtataaaacgcttcataaacttgcgctaagcaaagcctatgccttgctcagtatgagttatgtgctggtatggattgcttcaatggtacttcccggctgggaagggactttttcgctgaaagcactactgggagtagcctgtattatgagcgggttgatgctgattttcctgcccacgacaaaacaacgttactgagttttccctgccactttacactgccgttcccactcatcggggctataactgcttgccgagaggactttcaccgtatgcagcttttcacgattaatacaataaagcgcattctgcaaaggcgagagtaaatcccccactttcacggcgaagtcactcttcacttcggcgatcatttttatcgcgccgccagcatcgcagagcataagtacatgtctgttatcttgtttattgcagcacgattttttgaccagccattccattgcattatcctgtttgctaagagttttcacatcaatttacagattaacagataaactctttatcaacggcaatggaatggcagaaatgagaagtgaaacggagggttaattattgctgacgttgcacccactcttttagcgcctgacgtgaaattttaataccgccgtttttcagctccggcggcagagttagccagcgcaccggttgttgaaaacgggccagcttatctttcacccattcactaagatcaacgctctcgtggtcatactccatcaccgccaccggtcgatgaccaaactccttgtcggcaacggggacgataaacacctgcaaaaccgcaggatgtgcagcaattacgcgctcgacttcttccggctgaataccctctccgccactgaagaatagattgtctaaacgtccgacaatggtcagcttgccattatgcatctcaccgcgatcgcgcgtagcgtaccagccttcgtcattaaccagtgaaaccagttgcccgttacgccagtaaccttctgccatactggcagcccgcagccacacttcattattaacgattttcacttcccgacccggcagcggcgaaccaacgtctgccaggccgtcggcttctttcgcacacaccgtggaggcaaactcggtcagaccatagccgcaaaagcaacgaatcccctgctcgcgcgcctgttccgtcaactcgaccgggatagccgcgccgccaagtaacaccgctttcagggaaacggaactacggttaaccagcaaacgccagagttgtgttggcaccagtgaagcgtgagtacagcctgccagcatttgctccaatggctgtttatcacgtaccgtcatccgcgcaccagcgtataaccagcgccacataattccctgaccggagacgtgaaacagcggtaaagagagcaaccaatcatcgtgatcgccaaacggaatcagcgataacacaccttgcgcactggcaagatgggcctgataagtatggacagcggctttcggcaaaccggtagaacccgaggtcaacgtcattgagcacagacgcgtcggctgccacgtagcggcatgtgcgccttcaaccagctgaatgtgcagcgacgttaatgccggaaacgtgttttccccatccggcaccagagcaaattgcagcgtcagattgggcagcaattcttcaagcaacggttgcggcagctgagggttcacgggcaacacccgcgccccgcattgcagtaacgccagccaggcgagcagcgtttgcggcgtattccacgcccgcaacatcacgccgctgccctcaaccaccccctgcaccgcaaatccggaggctaattcatcgacgcgagcacaaagctcgcgccagttgagttgctcgtcattaagacgtaaggcgatggtttctccccgcacttgccgccagtgacgccacggccagtcagagaagatcataacaaccgctccagtgcatcaacttccacgacaggcagcgtgctacccggccagcgacgtacctgctgcgcctgcatcagatccagcgtgtccagccctggaatggtgtccggcgttaaccaggcggcaatccgcgccagttgcgttaagcctaagctcgattcaatggaagaactgatcaccgccgtcagccccagcgcgtgcgccgcctgtacctgctcgcgtactttttccagactgcccgtgagcgtgggtttgataactaccgcgcgcacgccctcttcagccacaaaggcaaaatccggctcgcgcaggctttcatcccaggcaatggcaatgccggtttcacgggcaaacgctcgcgaatcatcgcgggttttgcacggctcttcgagaaacgcgatgcggtcgcgataatccgggttaacgtatttggcaaactgctgacctttcagcggtgtccaggcgcgatttgcgtcaagacgcaaatgcagatccggaattgcctccagcaacagattcaccaccatgccgtcgcgcaccgcttcgtacaatcccactttgaccttcgccactttctcgcctggcatatctgcaagtttgaggatcagatcgtccggatcgccattacacagcggtgccgcacggtagttggctgcttgcggcaacgtatctgtcagttctgccaatgcacagcttacgccaaaggccacggaaggcatctgcggtagctcgcaatcgcctgccagccagttatttacccaggcaagcagcacactttgcgcctcttcccaggtttcctgactgaagcccggcagtggggagatctccccccacccttcgcgctcgccttcacgcaggcaaacatacagcccgtcgcgggtttttaaccgcctgtcgcgcagaaccacccccgcgtccatggggatctgccagcggtatacctgcgcgctacgcattacggattccgtttgaatttgctgaagtcaggctgacgtttctggttgaaggcgttgcgaccttcctgaccttcttccgtcatgtagaacagcatggtggcgttgcccgccagctcctgcagccccgcctgcccgtcacagtcggcgttcagtgcagctttcaggcagcgcagcgccatcgggctgttttgcagcatttcgcggcaccaacggacggtttctttttccagatccgccagcggtaccacggtgttcacaaggcccatatccagcgcctgttttgcgtcgtactgacggcacaggaaccagatttcacgcgcttttttctgcccgacgatgcgagccatgtaggaagcgccccagccgccgtcgaaggaaccgactttcgggccagtctgaccgaagatggcattatctgccgcgatagtcaggtcgcacatcatgtgcagaacgtgaccgccgccgatggagtagccagccaccatcgcgacaaccggtttcggacaggtacggatctgacgctggaagtccagcacattcaggtgatgtacgccggaatcatctttatagccgccgtaatcaccacgcactttctggtcaccaccggagcagaacgctttatcgcctgcaccagtcagaatgatcacgccgatgttgtcgtcataacgcgcatctgccagcgcctggatcatctcttttaccgtcagaggacggaaggcattgcgcacctgcggacgattaatggtgatttttgcgataccgtcggtggatttttcataacgaatgtcctcgaaaccttcggagcagtcgtgccattcaaccggtgcgtaaagcattgcttcatcaggataaatcatattgtgtcctttagtcagaaacgcaagatctgcgccagacttgcgattacgccagcgggattttcccgatgcgcgttatgtccggcgcgaggaatgacatggcagtcggcagccagttccgccgccagggcgcggaatttgctgtcacgttcaccacataaataataaaacgcaaatgtgcgggcgctaaggttagcacgtaaatcaggctggacggcgagagaagtcgcctccagcatggcggcaagcgttgcgccattattgttgctgcgcagcgccaccagctcccggcgttgatcgtcattgagtgaggcaaaaacaggctgttgataccagtcggcaaataccgccgttaacggttctgtgagaaaacgctgcacccattggcgatcggaacgctgacgttccgcacgttgttcagcattttgcagccccggatgcccgccttcgacaataaccccacaaagccccgccagcccctggcaagccgccatcatcgccacccgtccaccaagcgagtaccccaccagccagaagtcaaggatgttgtaactaaccaaggttttacgcagtaagtcggtgacatcatcaaatccatcgacgctaatcgccgccgaaccaccgtgacctgggagatcaacatacaaccgtgagtagtcggcaaacgcctcgcccacttcttgccattcgtggcaatcgccggaaaaaccgtgcaaaaacaccagccagggtaaacctggttttccgtgttttgcctgcgcgtgcaggatcataaatggcttacctgcgccagaagttgctggagcgtttgcgcaccatcggtgtcgttaaccaccatttcaatcaccgtggtggttggcgtgcgccaggcgtcggcaaatgccgtttcaagttcctgccagttttgcggacgatgatatttcagctcgaacatcgcggcggcgtgctcaaaatggacgttttgcggcatcagatagaaacgctcacgctcgctttgcggcgttggcaacagcgagaaaatttgcccgccgttgttgttcaccacaattaataccagcggcgcagaaacctgacgcaataacgccagcgcgttgagatcgtaaagtgcggagagatcgcccacaatcgccagcgtcggtttgccgcttgcccgctgaacgccggcggcggtcgaaagcagcccgtcgataccgctggccccacggttgctgtacaccgggtaacctgccggaagttgcgaaagcgcatcaatcagacgtaccaccaggctgttaccaacaaacaattgcccctgttcaggcagatagtcgcagatgcgatgcgccagttgcgcttcgccaaacgcatcacggcgggcaataaccgcctgcattgcctgttccgccaggcgcgggatttcaacgcaccagggctggcgtttttctgccggatgcagctccagccagtcggcaatattggcaattaagcgacgtccgcgatggtgtgccggatcaagtcgcccttcaatgtcatcaacaatccagtactcttctggttcacagcttgcctgccattgcaggagccgtttccccgtcaggctgcttcccagttgcaccacaatttgcgcctgctgcagctcgctggtcgctttggcattgcctaaccaaagatcggcacacggcagcggctgcccggtttgtgacagcacatcgccaatcagcggccagccaagagtttgcgcccacagggcaacttttttgccctcttccgcactcatgcgcccggcaaccaccacgccgcgcttttgtcgccagaagaaccagtcgcgctgtttttcactttccagacgaggcgcttcacgcagccacggtttgtcgtcctgccaccagtcacccagacgctgttgccagctaagcccggtatcgtccatttcgccatacagcggttcagcaaacgggcagttgatatggactccccccgcatgaagcgtaccgagagcgtggtcgatggtagaaaccagccaacgtgcggggatatcctgggtcgggcgcggcaatgaaatactgtgcgtggggtgagaggcgaacattcccggctggcgaattgcctgattcgcgccgcagtcaattagctccggcgggcgatcggcggttaagagaatcagtttttctccggttaacccggcttcaatcagtgccggatagagatttgccaccgccgtgccggaggtcacaatcaccgccaccggctgcttgctgactttcgccagccccagcgccagatgccccaacccacgctcatcgaaatgggtgtggtgaatgaatgcggaattctccgccgccgctaacgttaacggtgtagaacgcgagcctggggcgatacagatgtgtctgacgccgtgacgcgttaatgcttccagaatgaccgccgcccagcgtcggttaaatgcgcttactgacatgagtttgtccggtatcaatattgcggctaagtataaggagctacaaaaatagattattgatatgaatcggtaatgatgcgactcattactattccatttgtaataaagtacgcagccctgccgctttgttgtcgatttcctgccactcttgctcggggtcggaaccacggacaatgcccgcgccagcatataatcgcacgacattgccgctaatttttgctgagcgcagggaaacgcagaattcgctttgttgtaatgagagatagcccgcagaaccggcgtaccattctcgggtgaacggttcgtgacgggcgataaactgtcgcgccagatcgcgcggtaagccagcaactgctgccgttggctgcaactgatgtaaacagatcacatcatccgctttgttgagtgaagtccagatacagcggcgaagatgctgcactttacgcagacgcagtacctgcggcggtaaaacatccagcgtctgggtatcggcctgtaatcgttgacagatatcttccaccaccagcatgttctcgcgctggtttttatcatccgccatcagccactctcctaactgctgcgcctgcttatcatcaggattatttgctactgttcccgccagcgcttcagtacgcagcgctttgtcacgccgccgccataaccgttccggtgaagagccaagaaaagcattttcgccatcaaaggccatgtaaaaatggtagcaattcagattcagtcgacgactggcagccatcatcgccgccgcgttgaccggacttgcgaaatgcaggtcagttgcccgagcgagcaccactttgtcgagctcaccttcggcgatggttttcgttgccagttcgattaattgcgtccagcccgttttgtccggccagtgttgttctcgcgtggtggttaaatgtaacccaggcaagggcttgatactcaccagtgtggcgataaattcttttgcctgaatcgcatcgtgctgaagggagctttcgctgaatagcgtcagccgcagcgtggctttaccgccacagcgtcgccattccaggcggggtaaaagtaaattgccctgcgacgggtcaaaagcattcagcccccaaatgcgtaagtcggcgtgttccgggtgctggcgaagaaaacgttgtgcctggtccaacgacgtaaaacgggtaatcgcgcccaggacgacagcttcttcatcaccattacgttgttgccagtagaattgcgggtatgtttgctgactggccagccagctcaaggcatcaaaagcgtctttgagagggaaaggaatatcgataacccgaatgccgggtgtcgccggaatctcttgcgacaaatggcgcagtagattttccagcgccgtagtaagtgattgcacgcggacctctccctgttaaaagcctcacattatacggggtactacaaaaaaaatgcagtaccccggtgtagggaggttttaacggcgtgccagcaacagtcctagtaccagcccaacggccgcgcccacaccaattccttgccagggtttttcgtggacgtagtcatcagcacgataaactgcctgcttcgcccgatagtaataactgtctgaagcctggctaacccgttttttcacatcatccagcgctttttctgcacgcgctttcagctcaacatatttctgatcggcgggatcgccagaggagcggagcacctcttccagtgtttcactaagcagcgtcaggtcgtcatcgatacgtgtatcaccaaactgattagacattctcgttctccatttgcgtaaaacctgtcactaactatagacaagggttgttgattacgcctgaattacctcgcgtgccatcccaatgtgtgggataccatcttcttcatagacctccgtcacagggataaaaccgaaactctggtagaagttttgcagatgcgcctgcgccccgaggtaaacaggcttatcaggccagtgatgcgtacatgtttcgagtgttttactcatcagctgctgccccactttttcgccacgcaacgcttcactgacaatcacccgacctataacgaccggctcaagatcatcatcacttttcagaatcctcgcatacgccaccagttcatcatttttccaaccgagaatatggcgattatcccccgtcaaatcatcaccatcgatatcctgataagggcaattctgctcgacaacaaacaccgcgcaacgcagttgtaataaggcataaagctgggaaaccgataattcagagtgatgcagatcttgccattcaatcataatgctctccttttagatgtatgccttatactagccggaatattttttgaaacgtgatgaactcatggaattaatttttttaggtacttcagccggtgtgccaacccgcacgcgcaatgtcacggcaatattgcttaacctgcaacatccgacccagagcggactttggttgtttgactgcggtgaaggcacccagcatcagctactgcataccgcctttaaccctggaaaactggacaagatttttatcagtcaccttcatggcgatcatctttttggtttacccggcttgctgtgcagtcgttctatgtcaggcattatccaacccttaacgatttatggtccgcaaggtatccgtgaatttgtggaaaccgcgctgcggattagcggctcatggaccgattatccgctggaaattgtcgaaattggcgctggcgaaattctcgatgatggcctgcgcaaagtaaccgcttatccgctggaacacccactggaatgttatggctatcgtattgaagaacatgataaaccgggtgcattaaatgcccaggcattaaaagctgctggcgtgccgcctggcccactgtttcaggaattaaaagcgggcaaaacaatcacgctggaagatggaaggcagattaacggcgcagattacttagctgctccagtgccaggtaaagcgctcgctattttcggcgataccggcccctgcgatgccgcacttgacctggctaaaggtgtcgatgtcatggtgcacgaagcgacgctggatataaccatggaagccaaagccaatagtcgcggccatagctctacacgccaggctgcgacactagcccgtgaggctggagtcggcaagctaatcattacccacgtcagctcgcgctatgatgacaaaggttgtcagcacctgttacgtgaatgcaggtcaattttcccggcgactgaactggcgaatgatttcaccgtgtttaacgtttaactctgcttattattaaaaacagggcgaaacttgccctgttatcgcaacccgcgctacatatatccacccacacaggcatattgagcgatttttgatatttattcatctccttacgcactatattcagagcaataagttgcctcttttcatcttgattcagcacaacctttgcaactaaaaggagcccatgatggttacagttgtcagcaattattgtcaattatctcaaacgcaactcagtcagacatttgcagaaaaatttactgtgaccgaggaattactgcagtctttaaaaaaaacagcgttatccggagatgaagaaagcattgagttactgcataatattgcgttaggttatgataaatttgggaaagaagctgaagatattctttaccatattgttagaaccccaacaaatgagaccctatcgattatccgacttatcaaaaatgcttgtttaaaattatataatctggcacatatcgcaaccaactcccccctcaaatcacatgattcagatgatctcctgttcaaaaaactattctccccttcgaaattaatgacaattatcggtgatgaaattcctcttatatctgaaaaacagtcgctttcaaaggtgcttttaaatgatgagaataatgaactgagtgatggtacaaacttctgggataaaaatcgtcaattaaccacagatgaaatagcttgctatcttcagaagatcgccgctaatgcaaaaaatactcaagtcaattatcctactggtctctacgtcccctactccaccagaactcacctggaagacgctctcaatgaaaatattaagagcgatccatcatggccgaatgaagtccagttattccccataaatactggcggacactggatattagtttcgctacagaaaatagtaaataaaaaaaataataaactacaaataaaatgcgtcatattcaactcattgcgtgcactaggctatgataaagaaaattcacttaagcgtgtcattaatagttttaattctgaactcatgggagaaatgtcgaataataatataaaagttcatttaaatgaaccagagataatatttttacatgccgatcttcagcaatacttaagccaaagttgcggtgcatttgtgtgcatggcagcccaggaagtgattgaacaaagggaaagcaattctgacagcgccccctatacgttattaaaaaaccatgctgacagatttaaaaaatattcagcagaagagcagtacgaaattgattttcaacatcgactggcaaacagaaattgttatttagataaatatggcgatgcaaatatcaatcattattatagaaacttagaaataaaacactcacaacccaaaaatagagcatccggcaaaagagtgagttaacatcattgttaattaattcgaccagtcagcaaatatgctgactggtcgaacatagtttgctaaacagtcatcactgactgatgtcagtcacaccatccgccagttcaatcaggcgaataaattccgccctgtaaccctgtggatcttccccttttgcctgctgagcccactgtttgatctgctgccaggaggtattgttcaggtattcagaaccgcgtaacttttgcccatatgcagctactgctgcgcgaaaacgcatatcttcagagggcgcgtttattgttggccccagcgggaattcaactaactgactttcttttccctgcgggtatttccagcgaatttttaaccaggccagttctttcgttttgtccgatttcgctaatttgttatccggggcatagcgtaacttatcaattgatgctttttgcccgttcagcgttaattcgaataacaacgttatatgtttgcctgcgcctatatcccctgcatcaacgttgtcgttattaaaatgttccacccgaagttggcgcttttcataaccaatctgacggtattccgttacccacgcggggttaaactcaatttgcgctttgacatcttttgctacggtaatcaacatctgccgcatttcactattcaatactttctgcgcttcagagagggtatcaatgtagctgtagttgccgttaccaacatcggcaattcgcaccatcattgcctcgttgtaattgctattccccacgccaaacgtcgacagagtaacaccagactcccgctgttttttgaccattgattcaatcgattttggatcgtcaatgccaacgttaaagtcaccgtcagtggctaataaaatgcgattgatgccgcccttaataaaccccttcgtcgcctgctgataagccagttccagcccggcaccgccattggtactgccttcggcatccagcgaatcaattgcggcattaatttccgccttatgactcccggagatagaaggcaatgcaatacgggagtcgccagcgtaggtcacgatggcaatgttatcctgctcacgaagttctttgaccaataatttcaacgaagactggataagtggcaaacgttcatcagaaatcattgaaccagaagtgtcgataagaaagaccagattagaagctggtaactcttcacttttgcgatctttcgccaggatatcaactttcagcaatgttcgctgttcattccatggtgcaggtgccaattcgtagcgcatagcgaaaggtattggcttagaggccggaatagattgtttgtctttgatatcccaatcagacgggaaataattgactatctcctccacccgcacagcgtctggcggaggtaacagcccttgattgaggaaacgccttacattcgcataactgccagtgtcaacgtcaagactaaacgtcgccaacggattttgcgctacctgcttaaccggattatcatcgaactgctggtagcgagcggttcctggatttgcgatatgtgtagcttttgctttagccgctcttgcaaatgttggcgcttcctgcaatcgcccctgtaaagcctgtttgtctgaatattgttgcacttcttgctgggccaaggctttcgcggcggcggcgctttgctcagcctcttttattgcagcttgctgcgcggcaagcacttgctgctctgtgggagtactgggttgttgttgctgactttccttattctcaggttgcggcccacatcctgacaaaatcaaactactcataagcaacatgattatatttttatttcgcatataaaatccttttaaataaactcaggcaccagacataaaatatactctttgtataatcctgctaatcttaataaaatacaatatcgaaacccatagcaaataatgattcaacaacgcaacccattaataatttgcatatgaaaaaaataatctttgcttttattatattatttgtgtttttactccctatgattattttttaccaaccctgggtcaatgcattaccgtcaacgccccgacacgcaagtcctgagcaattagaaaaaacagttcgttatcttacacaaactgtgcatccacgtagtgccgacaatattgataatctgaataggtccgcagaatatataaaagaggtctttgtcagtagcggtgccagagttacctcgcaggacgtccccattacgggtggcccctacaaaaacattgttgctgattatggtcctgccgatggaccgctgattattattggtgcgcattatgactctgccagcagttatgaaaacgatcaattgacctatacgccgggcgcggatgataacgccagcggtgtggcaggattactcgaactggcacgtttgttacatcagcaagtaccgaaaacaggcgtgcagctggtcgcctatgcgtcggaagaaccgcccttctttcgtagcgatgaaatggggagcgcggtgcatgcagcttcgcttgagcgtccagtgaaattaatgatagcactggagatgattggctattacgactctgcgcctggaagccagaattacccttacccggcaatgtcctggctttatcccgatcggggagactttattgccgtggtcggcagaatacaggatatcaacgccgttcgtcaggtaaaagcggcattgttgtcatctcaggatttatctgtttattctatgaataccccagggtttattcccggtattgatttctctgaccacctgaattattggcaacacgatattcccgccataatgattactgacaccgctttttatcgtaataaacaataccacttgcccggtgataccgcagacagattgaattatcagaaaatggctcaggtagtggatggtgttataactttgttatacaacagtaaataataaaaatttctcgaggcgggtccagaaaaagcgacatgcacattttattttccctcatctgttttaagatgcgaaacatgaaattcaacggaggaaaaataaatgggaatgattggctattttgcagaaattgactcagaaaagattaaccaactgcttgagtctactgaaaaacctttgatggataatatacatgacacgctttcaggattacgccgactggatattgataaacgctgggattttttacactttgggctgacaggcacctctgcttttgatcccgcgaagaatgatccgctgagtcgtgccgtgcttggtgaacacagcctcgaagatggcatagatggcttccttggattgacctggaatcaggagttagccgcgacaatcgaccgactggaatcactggatcgaaatgaactgcgtaaacagttttccattaagcgactcaatgaaatggagatttatccgggagtgaccttttcagaagagttagaggggcaactctttgcctcgatcatgcttgatatggaaaagctgattagcgcgtatcgacgtatgctgcgacaagggaatcatgcgctgacggttattgttgggtgatatagcttgatgcctgggggagaaagacccattagttaagatttacgccaggatcatcttgaaaaaatctttaaccatggtccggtttttatccccttgtataaatattactaaatgcttgcttagtcgcattgttaaatgcaataccgtatattcggtatgtaacagcgatatcctctgtgctggcaacgatctgtcatgcttgatgaaaacggaattgaacctgtcattaccaggtagataaaaagcctgttcaattttgggattattttttataactcgtgtctgttatggcgacacgggaaaacatcaatattgtccttcacaaattgcagtaatatagaatcaacctctcttgcaagttggtcacaatgtattataagcattttgaatatgtcatcctctgtaatctcgtgaaaattttcggccttgtcttttagctcatcatatcggattcttgcagtaaccattttttgggcgagttctaataaccccaaagcttgcaattgctggtgagtatgatcactttcaaaaaatatcccacactccattccttcccaaccaacatattcatgccattcataaaccagcataaatgtttgtaaaactggcggtaataattggatatctgcaaaaccaaaccaaaacttacgcttgagatcccactcatattcaatcgccaatgctatattgtttaaggcatctccggcatccttatttttacgcaaaatcaattccgtcagtgtatagcgttgttcatcaatacgccgaagagcttctgcaatatcatagtttgtagccaacaaaacattctctgcttcctgatgagtgacgtctgcttttgccgtcaatatattgatttggtcaatatgaaacaacttgatggcttcatcaacatcaccgccagtcctctctaacaaacgtctggcaacctggataccgacaggtacgttcttccgaagtttacgaatttcacttaaccattccatgtcaaacccctttaaatatttatgatattaaatataacaacgtctggataacgacccggcctgactgaatatctcacgttttcctgcttaacattcatgttatgatgctcttgaaactaataatacgtatggaattgtcactatttatctgctaatgaattcaaacaatgtcattcgtttgatgaatatattatttcagggaataattatgacacctttagaacgcattacccaacttgttaatatcaatggtgatgttaataatcctgatactcctcgtccattgttatctcttgaggatttttttattgacaataatatccatggttcaatatgttgcaatgtgattccagaacaatctccgcaagctatctatcaccattttctgaaaatacgtgagcgtaacaatgttagtgatgttttggtagaaattacgatgttcgatgacccagactggccctttagtgaaagtattttagttatcaccactgcttcaccagaagaagttcagagctggtttgtagaagaaattgcccctgatgagtgctgggaaggatggtcagaagatacggagcatggatgggttgaagtccctgtgggtatgcatccggttacttgttggtgggattaaaacatttatataaacagataagcggatgtttacataaatttttatgtgaaggaacatgatgaaacttattcctcgcagtagtgatatttcacctggcattgatggaatttgcccggggccttttcctccgaacggatttaccgtacttacagatgcagcatatggtaacggagactgtttcggtttgtactggcctattggtcaggagcataaactacctatagtgtgcgaaacgtaccatgacgaatggcgaatcgtacctgccttttccagcattaagaagttcgaagaatggctggaagtgaatgatgatgatccccatgaaaatggcatcagcatcgaagatcaagactttgcagcaaatctcttccgtgttgctcggaaatgtctttcaacgggaaggcttgatgacgcactgccactgttacagcgagcaacagaacaattgcctgaagtcagcgaatattggttagcactggcaatccagtatcgccgatgtaaaaaaacagaagctgcagcacaggctgcgcttaatgcttatcttggcaattgggcatttggtgttcctgacaataaagtcattcatttgctgtcacaggccgcagatgtcccgaatttccaggatgatcctgtgattcagtgcattaaagaacaaggattagatcttagctttggaggaacaaaggaaaataataattaccccttgatgcagatgtgtgttgatacttattttgcgcagagaaaaccgcttcaggcattaaccctgttacataattatgcctggataatgtccagtgaaacgactgcatttcaggaacgctatgattttaatatcgatgaatggcgggcaaaattcaggcagttatgtttagagtattttggcgatagtcgtacacagttcacttaacgctctgcgtctatctactatcccttctttttcagaaaaaccgccgagcatgtcggcggctttctgacttacaaagtaacagattacatcagcggcattgccaaacgcacaatgctaatcagcggttgtggccatacacccagcaccagtaccaacagtgcagagatcagcacaacgataccgcccgcgctgtactgccagtttgatggtgcatcgcgacccggttgttccggggcgtgaagatacaggctcaccgccacgcgcaggtagtagtagaggccgattgccgaaccgacaaccacggcacccaccagccaccacaagtgtgcctggacaccgaccgccagcacgtagaacttaccgataaagcccagcgtcatcgggataccggccagagacagcatcatcaccgtcatcactgccgcgaggatcggacgatgccagaacagaccgcggtaagagaacagggaatcagcatccgggccacgatacgggctggacatcaggctgaccacgccgaacgcgccgaggctgctgaacagataaccggccaggtaaacccctaccgcttccatcgacatctcgccggtttgcagcgcaatcagcgctaccagcagatagccgaggtgagagatagatgagtaaccgagcagacgtttgatattggtctggctcagcgccatcaggttaccgaagatgatggaggcaaaggcgataatcgccagcaccacgcgaatcgcttcgctgtcacccaccggtgcgtagaggaacagacgcatcaccacaccgaagatagcgattttgctcgccgtcgccaggaaagtggaaaccggcgcaggcgcgccctggtatacgtctggcgtccacaggtggaacggcaccagagagagtttgaagccgaggccaacaatcatcaggccgaaacctgccagcaacagcggctcgttgagcataccgtcgccaaggtttttacccaacgcgacaaacgacaggtcgccagactgcgcatacaccagcgccataccaaacagcaggaaagaagacgctgcggcagaaaggatggtgtatttgatactggcttccagtgaacgtttctggcggaaagcgtaaccgaccaggccaaacagcggcaaagagatcagttcgataccgaggaacagagacgccagatggttggcattcgccagcaggatcccgcccagcgcggcaattaacaccaacaggtagaactcatccttgttgtcgttatagccttcaagccacgggtaggcgaaagtacaggtggcgaggctcgccaacaataccagcccggtgtaaagcatggcgaaaccatcaacgcgcatcagcggcgtaacgtccatagcgcccgcctggccaacaaaccagagcgaaaccagcgccgcgttaagcccaataaccgagagcgtagcgttgaggaaatgattgcgtcgccacgcaatggagagcatcacaaccaccaccgtcaagccgacgatcagcaacggtagcagtgcgatcaggttttgtggagttattgtcatggcgatttacggccttgtagtagtaacggaattaacaaaccactgctggatattgccaatcgcggagtgcgaggtatccagaatcggctgcggatagaagcccagcagtaccagcagcaccaccagcaacaggatcataaacagctcacgcagcgacatccctggcagttcctggctggcaatctggcttttcgctttaccgaagtaagcgcgatgtaacatcgccagcgaataaacagatgcaaagaccagcccaaaggtagagataacggtaatcaccggtacaacctggaagctgccgaacagaatcataaattcgccgacgaagttaccggtgccaggcatcccaagcgttgccaccgcaaagaacagcgacagtgctggcagccatttcatcttgctccacagaccgcccatcatgcgcatgtcgcgggtatggatacgttcataaagctgaccacaaagaataaacagacccgccgccgacaaaccgtgcgcaatcatctggattaccgcgccctggtaggccaactggctgccggtgtagatagcaatcagcacgaagcccatgtgggaaaccgaggtgtaggcgatcagacgtttgatatcggtctgggcgaaggccatccacgcaccgtagaagatgccgataacacccagccacatagcaattggcgcgaactctgccgacgcgttcgggaacagcggcagggagaaacgcagcaaaccgtaagcggcagttttcagcaagatccccgcgaggtcaacggaaccggcggtcggagcctgggagtgcgcatccggcagccagccatgcagcggaaccaccggcattttgactgcgaaggcgatgaagaagcccagcattaacaggtattccacaccactggacattggcgtattcagcagctcttcatagttgaaggtccagacgccggtcgcattgtagtgaacaaaaaccagcgccaggatggcaatcaacatcaccaggccactcgcctgggtgtaaatgaagaacttggttgccgccgtgatacgcgttttaccgtcagaggctttatgcccccacagtgcgatcaggaagtacatcggcaccagcatcatttcccagaagaagaagaacaggaacatgtcgatggcaaggaacacgccgataacgccgcccaggatccacatcaggttgaggtggaagaagccctgatatttttcgatctctttccacgaacatagtaccgccagcacaccgagcagaccggtcagcacgaccatcagcagcgacagcccgtcaatggcgagatgaatagagataccaaaacgcgggatccacggcatgtcgaattcagactgccactgcggaattccggcggattgcgtcagtgaataaccgccctgcaaccacagttgcagcgacagcgccagcgtcaatcccatggtgatcagcgcgatccagcgtggcaccttgacgccaaagcgttcggtctgccagcacaggaagccgccaataaagggaattaatattagccagggtagtaacatggcgatctttattccttgtaaaagtcccgtcaggaccggattttcaacgaattctcacgacagaaaattctcttcggactgggggtagtgtcggatgcaccgcgaaggcggcttatccgacctacgttcttatatgcccaggggcaatcccacaatccttaactcaacgcagtaccatcaacagtgccagcaccacgaccgcaccgatgctcatggatgccacataccagcgcagatagccgttctcacttaacagcagacctttacctgcaaagcgggaaaggacagccgggatgttcatcattgagttcagcggatcgcgtttcagcaaccaggcaatacccaggaacggcttgacgaacactttgtcatacagccagtcaaatccccaggcgttgtaccaccaggtgcccagcagacggcccggcgcactgttggcgatggaggtcaccagagtacgtttacccagccacagccaggctgccagcagaatgccgaccaccgcgaccacgccagaggtaatttccagggtcaacatgctgccgtgcgccagttccgtcgtttgcggaagcacgccctgcagcggcggtacaatcagtgcgccaacgaaggtggaaaggatcagcagcacaatcagcggcaggctgtgagttacccctttcacggcgtgagcgtgaatttgttcttttccgtggaagacgatgaaaatcatacggaaggtgtagagcgaggtcataaacgcaccgaccagacctgccaccatcagattgatatgaccattcgccatcgcacccgcgaggatctcatccttactgaagaagcccgcagtgaccagcggtagtgccgacagtgctgcgccgcccaccaggaagcagagataaaccagcggaatagatttacgcagaccgcccatcttgaagatgttctgttcgtgatggcaggccagaatgacggaaccggatgccaggaacagcagcgctttaaagaacgcgtgggtcatcaagtggaaaatcgccgcatcccatgcctgcacgccaagcgcgaggaacatgtagccaatctggctcatggtagagtaagcgagaacacgtttgatgtcggtctgtaccagcgcggcaaaaccggccagcagcagcgtaaccgccccgacaatacccaccagatgcagaacttccggcgtcatcaggaacaggccgtgggtacgggcgatcaggtagacacccgcggttaccatggttgcggcgtggatcagcgcggagacaggcgtcgggcccgccatcgcgtcggcaagccatgtctgcaacggcaactgcgcagatttaccgaccgcaccgcccagcagcatcagcgtcgcccacatcagcatgttattgccgtcagcaaagtgcgctggtgccagttccaccatttcgcggaagttcagggtgcccagttcgttgtaaagaatgaacagtgcgaaagcgaggaacacgtcacccacacgggtcacgacgaacgctttcattgccgctgcgccattcttcggatcggtgtaatagaacccgatcagcagataggagcacaggcccacgccttcccagccgaggtacatcagcagcaggttgtcggcaagcaccagaaccaccatgctggcgatgaacaggttggtgtaagcgaagaagcgagagtagccctcttcaccgcgcatataccaggaggcgtacatgtgaataaggaaacccacaccagtgaccaccgagagcatggtcagcgacaggccgtccagcaccaggttaaaaccgatgttaaagtcgcctaccgacatccacgtccacagcggctggctgtatgtctgctcgccgttagcgaagaaatcaacgccgataaaggcggttaccagcgccgccaggcccacagagcctacgccgacgatcgccgagacgttttcagaccagcgcccacgggagaatgccagcaggacgaagccaatcaatggcaaaataatggttaaggcaagcatgttcatccgcgcatctcacttactgaatcgatgttcaggttctggcgacgacggtgaagttgcagcagcagcgcaaggccgatactcgcttctgccgccgcgaggctgatggcgagaatgtacatcacctgaccgtcggtctggccccagtagcttccggcgaccacgaaggccagcgcggaggcgttaatcatgatttccagaccaatcaacataaacagcagattgcgacggataaccagaccggttaagccaagaacgaataagattgccgcgaggatcagtccatgttgtaaggggatcatgcgtgctcctccgtttttcttttcgcgctgtcgtctttacgattgctcagcacttcacccgcacgctcttcacgaccgacgtggaaggccacaaccagacctgcgagcagcagcatagaagccagttccaccgccagtacgtaaggcccgaacagcgtaatacccactgctttagcactgattggcgtaccgtcgataccctgatcgttaacaccgaggatggcgtaaacaatcaccaccagcatgatggccgacaaaattgccggaccaatccacacctgcggtttcagccactggcgttcctgttcgatttctgaaccgcccaggttgagcatcatcaccacgaacacgaacagcaccataatggcacccgcgtagacgataatttccagcgcaccggcgaagtaagcgcccagtgagaagaacaccccggaaatcgccagcagcgaaataatcaggtacagcagtgcgtgtaccggattggtatgggtgatcactcgcaaggtcgcaagtatggctatcaggccacagatataaaaagcgaactccattgcccctctccttacggtaacaggctcttgacgtcgataggcttggcttcgttctctgcttcgcccttatctttgccgtcgattgccatacctgccatccggtagaagttatattccgggtatttgcccggaccggagatcagcagatcctctttctcgtaaaccagatcctggcgcttgtattcccccatttcgaaatccggggttaactgaatcgccgtggtcggacaggcttcttcgcacagaccacagaaaatgcagcgtgagaagttgatgcggaaaaattccgggtaccagcgaccgtctttggtttctgctttttgcagcgagatacagccgaccgggcaggctaccgcgcagaggttacaggctacgcaacgctcttcgccgtccgggtcgcgggtcagaacgatacgaccacgataacggggcggcagatagaccggctcttccgggtacattcgcgtttcgcgtttggcgaacgcgtgcaggccgatcatccagatactacgaacctgggtgccgaaacctactaacaattcttttaaggtcatggtcttattgccccttattgcgcctgccagagaatgacagccgccgttaccagcaagttgatcagcgtcagcggcaggcagattttccagccgaaggacattacctggtcataacgcggacgcggtaacgacgcacgaatcaaaatgaacatcatcataaagaacgcggttttcagcgcgaaccagatgaatggcggtaacaacgggccttgccagccaccgaagaacagcgtcaccatcaatgcagagatggtcacaatcccgatgtactcacccacgaagaacagaccgaacttcataccggaatattcaatgtggtaaccatccgccagttcctgctcggcttccggctggtcaaacgggtgacggtgacataccgccacgcccgcgatggcaaaggtaataaaaccaaagaattgcgggataacgttccacacatgcgcctggctgttgacgatgtcggtcatgttgaatgaaccggcctgcgccaccacgcccatcaaggaaagcccgaggaacacttcgtagctcagggtctgcgcagaagcacgcatcgcacccagcaacgagtatttgttgttacttgaccagcccgcaaacagcaccgcgtaaaccgccagacctgccatcatcaggaagaacaaaatcccgatgttcaggtcggcaaccacccaacccggactgactggcacaatcgcaaaggccagcagcagcgaggtaaaggcaatcatcggtgccagggtaaagatgacgcgatccgagaatttcgggatccagtcttctttaaagaacattttgatcatgtccgcaaccagctggagcgaaccgccccagccaacacggttaggtccgtaacggttctggaacagacccagcaggcgacgttcgccaaagctcatgaatgccccgcaggtgacaaccaccagcaggatcaccaccgctttgaggatggtcagcaggatctcaatcagttccggtgatatccaactcattgttgtgcctccttgagatcctcaagatgcgcgccagccagcaccggagcaatgccggacatacccatcggcaagcccacctgccctgccgtcagtccttcggcgatttcaaccggcagcgtgaccgtgttgccatcgtaactaaaggagacgcgtgtacctgcgttcacacccaacttcgcggcatccgctgggttgagtttgatgtacggctgcggcatacggctctggaagaccggagcacgctgtgacaattcatcgctgccaaacaggtggtaatacggcgcgatacgccatttcccgtcctgcggctggaagcgtgccggtacgctggtgaagtaatccagaccattttcgctggtttcaaacagacgcacgcccggatcgccaaagcgcagtttgccgcccacttcgtcctggaatttgttccacgcctgcggggagttccagcccggcgcccaggcaaacggcacttgcgaacggtgcgcagtcggctggttgttaccttccatcgagaaggtgaacatggtgtcaatatcctgcggctgacgcggctcatgaacgctgatattggcgcgcatggcggtacgaccgctgtaacggtgcggttcacgggccagtttctgcccacgaatacggaatgtcgcatccggcgcagcatctttgatacctgccagttccgggattttcgccacaacagcgtcaatcacatggtcgagctgcgtccagtccacttcacggctcagcagggtgctgtgcagcgagtgtaaccagcgccagctttccagcatgacagttttgctgtcgtaataagcaggatcgtaaacctggaagaaacgttgggcgcggccttcgttgttgatcaccgtaccgtcgctttcagcaaagctggcagcagaaagtaccagatgggcgttttccataatcgctgtgcgttgatgatcaaccaccatcaccagcggtgctttagccagcgcagcattcacgcggatagcagaagcgtgacgatgcagatcgttttccaacaccaccaccgcgtcggcgcgtccggtttccagttcggttaacgcttcttcaagcgaaccgccacccataatgcccagccccatgctgttgacggaacgggcaatcatggtgataccgacgtcagcgccgcgacctttcagggctttcgcgacgttagccgccgcctgaatcacctctaagctaccggcgttcgtcccggagataatcaacggtttcttcgcacctgccagtgcctgcacgatgacgtcgattttgctttgcagctcaggttcgataccgtcaaccgctggtgcagagttatccagcgcatgggcgatggcaaaacctaaacgcgcctgatcttcaaccggtgcgcggtaagtccacgccgcgatatcatccagacgggtgtcatcaacgttggtaacaaacagcggatgcttcgcacgttgaccgatgttgaggattgccgcaatctgccagtcagccactttctgtgctgccgccatttcgcgcgctttacctttcacagcctgacgcactgccagcgcgacgcgcgcgccggtctgggtaacgtcttcgcccagcaccagtaccgcatcgtaagattcgatttcgcgcagagccggagtataaatgccgccttcacgcagcactttcagcgccagttgcagacgttcctgctcaccgtgagcgataccggtgtagaagttttcttcgcccaccagttcacgcagcgcaaagttgctttccacgctggcacgcggagaaccaataccgatcactttcttcgactgacgcagaatatctgccgcgccctgcattgcctgttcggcgttgagggtaatgaaatcatcgccacgacgctgtactggctgacgcggacgatccttcaggttgacgtaaccgtaaccgaaacgaccacggtcgcagaggaagtagtggtttaccgtaccgttgtaacggttttcgatacgacgcagttcgccgtaacgttcaccggggctgatgttacagccgatggaacattgctggcagatgctcggcgcaaactgcatatcccatttacggttgtaacgctcggagtgcgttttgtcggtaaatacgccggtcgggcaaatttcgaccaggttaccggaaaattcgctttccagcgtgccgtcttccgggcgaccgaagtagacgttgtcgtgcgcaccgtaaacgcccagatctgtaccgtcagcgtaatctttgtagtaacgcacacagcggtagcaggcgatgcagcggttcatttcgtgagagatgaatggccccaaatcctgattacggtgggtacgtttggtgaaacggtagcgacggaagctgtgtccggtcatcacagtcatatcctgaagatggcagttaccgccctcttcacataccggacagtcgtgcgggtggttggtcatcaaccactcgaccacgctttcacggaactgtttcgcttcttcgtcgtcaatggaaataaaggtgccatcggaagccggtgtcatacaggacatcaccaggcgaccacgcgtgtcttccgcgttttggtattgcttcaccgcacactggcggcaagcaccgacacttcccagcgccggatgccagcaaaagtaaggaatatcaaggcccagagacagacaagcttccagcaggttgtccgctccgttgacctcgtattctttgccgtctacatgaattgtagccattagcatgcttccagttttctcagtcagagactgagcgttaatcgaaattcggttaccagcgctctttcagcaggttcggctgaatcccattaatcaaatgggtattgctgaacggctgtttgattcccgcctcaaattcttcgcggaaatatttgatggcgctctgtaacggctccactgcaccaggtgcgtgggcacagaaagttttacccgggcctaagaatcgacacagttgctcaagtgtttcgatatcgcccggctgaccttcaccacgctccagcgcacgcagaattttcacgctccacggcagaccgtcgcggcacggcgtacaccagccgcaggactcacgggcgaaaaactcttccaggttacgcaccagcgacaccatgttgatctcatggtcaaccgccatcgccagcgccgtacccagacggctgcccgctttaccgatactttcgaattccatcggcagatcaaggtgcgcttcggtcaggaagtcagtccccgcgccgcctggctgccaggctttaaatttcagaccatcacgcataccaccggcgtaatcttcgaggatctcgcgtgcggtggtgccgaacggcagttcccacagtcccggatttttcacccgaccggagaagcccatcagcttggtgccagcatctttacttttcgagatgttctgataccactccacgccgttagcgaggatcgccggaacgttacacagggtttcgacgttgttgacacaggtcggtttaccccatgcgccggaggttgccgggaagggtggcttcgagcgtgggttagcacgacgtccttccagggagttgattaacgctgtttcttccccgcagatgtagcgccctgccccggtatggacgaacagttcgaaatcgaaacctgttcccataatgtttttgccaagcagacccgcttcggtggcttcggcaatggcacggcgcagattaactgccgcttcgatatattcgccacgcaggaagatgtagccacggtaagctttcagcgcaaacgcggagatgagcataccttccaccagcaggtgcggcagttgctccatcaacaggcggtctttataggtgcccggctccatttcatcggcattacacagcaggtaacggatgttcatggattcgtctttcggcatcaggctccatttcaggccagtcgagaagcccgcgccgccgcgccctttcagaccagcgtcttttacctgattaacgatttcgtccggagacagcccggtcagcgccttacgcgcgccttcgtaaccgtttttgctgcggtattcgtccagccacactggctgtttgtcatcgcgcagacgccaggtcagcggatgcgtttcgggagtacggataatgtttttcatttataccgctccagcagttcagggatcgcttccggggtcagatgcgcgtgagtgtcctcatcgatcatcatgtttggccctttatcacagttccccaggcagcaagttggcagcagcgtaaagcggccatcaaatgtcgtttgccctggtttgatgttcagctttttctcgagcgccgcctgaataccctgataaccgttgatatgacagaccacgctgtcacaataacggatcacatggcgaccaaccggctggcggaagatctgactgtagaacgttgccacaccttcgacgtcgcttgccggaatacccagcacatcggcgatcgcgtggatcgcaccatccggcacccagccacgctgcttctgaacgattttcagcgcttcaatggacgccgcacgcgggtcttcgtagtggtgcatctcgtgctcgatcgcttcacgctctgccgcactcagctcaaaagcctcggtttgtggttgttgattctcgtgcataattagcggtccacatctgacataacaaaatcgatactgcccagataaacaatcaggtcagacaccaggctgccgcggatcgccgccggaatttgctgcaaatgcgcaaagctcggggtacgaacacgggtgcggtaactcatggtgctgccgtcgctggtcaggtagtaactgttgatccctttggtcgcctcaatcatctggaaagattcattggcaggcatcaccggaccccacgacacttgcaggaagtgggtgatcagggtttcgatatgttgcagcgtgcgctctttcggcggcggcgtggtcagcgggtgatccgctttgaacgggccttccggcatgttgttgaggcactgctcaagaatgcgcagactctggcgcagctcttccactttaagcattacgcgggtgtagcagtcagaaacgccaccacccaccgggatttcaaagtcgaagttttcatagccagaataaggacgcgccttacgcacgtcgaagtcgatcccggtagcacgcaggcccgcgccagtggtgccccactccagcgcctctttcgcgccataggcggcaacgccctgggaacgacctttcagaatggtgttttgcagcgccgctttctcgtaagacgccagacgtttcggcatccagtcgaggaactcacgcagcaggcgatcccagccgcgcggcaggtcgtgcgctacgccgccaatacggaaccacgccgggtgcatacggaaaccagtgattgcttccaccagatcgtaaattttctgacgatcggtaaaggcgaagaacactggcgtcattgcgccgacgtcctgaataaaggtcgagatatacagcaggtgactgttgatgcggaacagttcggagagcataacgcgaatgacgttaacgcgatccggcacggtgatcccggccagtttctctaccgccagcacgtaaggcatttcgttaacgcagccgccgaggtattcgatacggtcagtatacggaatgtagctgtgccaggactggcgttcgcccattttctccgcaccacggtggtggtaaccgatgtctggtacgcagtcgacaatctcttcgccatcgagttgcaaaacgatacggaaagccccgtgcgccgacgggtggttcggaccgaggttgaggaacatgaagtcctcgttttcggtgccgcgcttcatcccccactcttccggtttgaaggtcagggcttccatctccagatcctgtttggctttggtcagctcaaacggcgagaattcggtagcgcgcgccggataatctttacgcagcgggtgacctttccaggtttgcggcatcatgatgcgtcgcaggttcgggtgaccgtcgaaagtaatgccaaacagatcccaggtttcacgctcataccagttagcgttcgggaacagtttggtgaaggtcggtacgtgcaggtcgttttctgccagcgccaccttcagcatgatgtcgcggttacgatcgatagaaatcagatggtagaaaacggaaaaatccgcggcaggtaacccttcgcggtgtgtgcgcagacgttcgtccatgccgtgtaagtcaaacagcatgacgtaaggtttcggcagtttctttaagaaatcgccaacttccagtaattgttcacgcttgatccacacaacgggaaccccggtgcgagtcgcctgaacagtaaaggcatccggcccaaaacggttgcgcagttcgccaatcaccggatcatcaagatgatcgcgggtctgccaggcgggttcttgcgcggttaagtcggtcatattgttcaccattgcaaatggtccgtggtgactgtcggcgcagtaagcttcgcgaaatagatttaggaataagcgaagaaaaatccctttgccgacaggcgcaaattaaatctcgtcaggtgtacgcaggttagttacggcaatgcgttcaccgcgcttgcgttcgcgctctgattgcatattggcgcgataaacgccctgatcgccaaccacccaggagagcggacgacgttctttgccgatagattcctgcaacagcatcagtgcctgcatgtacgcttcaggacgcggcgggcagcccgggatatacacatcaaccgggatgaatttatcgacgccctgcacaacggaataaatatcgtacataccaccagagttggcacaggcacccattgagataacccattttggttccagcatctggtcatacagacgctgaataaccggtgccattttggtaaagcaggttcctgcaaccaccatcaggtcagcctgacgcggcgaagcacgcaatacttctgcgccaaaacgcgccacgtcatgcaccgcggtaaacgaagtcaccatctcaacgtaacagcaggaaagaccgaagttatacggccaaattgagtttttacgaccccagttaaccatgtcattgagcttgcccataaacacgtttttgttaacttcttgctccagagggtcggttacgatctcctgcttttgcagggggtaacggtcgttctcaccgttgggatctatgcgggtgagcgtataatccatcttaatgcctcgcggttagcgttgacgattagcgatactgttcgtttccgggttcatacgctcgcggcgtgaacgcgcgggcgtccagtccagcgcgccaatacgcaccagataaaccagacctgccagtaacacaaaaataaaaattgcagcttccacaaagcctacccagccgctttcgcggatagaggttgaccatgcgaacagatacagcgcttcaacgtcgaagataacgaagaacatggccaccagataaaacttggcggacaggcgtaagcgggcggagccgaccgagtcgataccggattcaaacggcacgtttttcgacctcgcgcgtgcgcgaccgcctaaaaaccaaccgcctaccagcatcaggcaacacaggccaatggcaacgataagaaagatagcgaatgcccagtgatgagcgatgacttcagtggatgttgacatactcattgcttactcatcaaaagtagcgccagattcactgctcttcacggcagatggacgccacatcgattcatggggaggaataaaaaaaaccttacaatcactgtagaaattcttttatacagctaattgatgtggttttttactcctttctataaccttttgtcaactttaacaaaagtttcttcacattagtttacataatatcaacaccattagcatttaatgccctttcaccccagatccttgacgactccaggataattagatgttgttgaatcgtgtccgttgtgaagcaatggaaaaaatacgggtctattttgacaggaatttgtgtcgattcctccccccaaaagagagtattttcttgatctgtgacacgcttttgtcattccataacaaaaacgcagcaacaaatttacgtattttttaacatcattgtagcaggtgatttttttcaggcgattatttgtgcgttcgggacgtgaatctctggtggttgaaaaatgaacagttttgtacgttctgcactatgcgatgaaggatttttactaaaaaaaagccgctggggtttaaaacacccccagcggctcgttttttacactattgtctcaggaattatctatcgtccgtcgattactcgatatccctttcaatcaacaatgaatcatccccttccggagcagacattgggctgtattgccacggattatggtagctctccatcgcctgatagatcacctgggccagctcattattactggacggatcatagcacagcaaatattcggtatcaggtagcggcggtaagccatctactccactcagcacacgcaggtccgggctcatcatctcaaccggccttgccgtcacgccaagaccggctttcactgccgcacgaacggccggaagcgtcgaggcgacataagccagtcgccatggaatatctgctttattaagcgtcgccagcaccatatcgcgaaacgggctaggatcatccagcaatacaagagggatcggctcgcctttttgcaatatgtattccgctgcgcagtaccagtgtgttggcgaggtacgcaggttcaatgccttaaacgctgaaggacgatgggtggttaccatcaaatccacttcctgggattccagcatttctgccatataggcattacgtttaacgcggacatccagcgctaatttcggataaaccgaactcacgcgatttaacaggaaaggtaagatcgtatcggcagattcatctgaagcaccgatagttaatacgccctgaagattactgaacattaatgatgagcaggcctcatcattaaaacgcaggattttcctggcgtaaccaagaagttgaatgccatgttcagttaacagtttgttgcgaccgtgacgagcgaacagttctttcccaacgagttgttccagacgctgcatttgctgacttacggcggactgagtacgacacacagcggcagctgcggcagcaaaagtgttcagatcggcaacagcaacaaatgttctcagcagatcgaggtcgaggttaattatcggacgatttgcacttatcatatattatcacttactggcggctcatactgagctggttaatgctgtgcacacacaaacaagcaattccatttgtaatgtgcctccctggcagtttcatccggaacccggacgaaagtaaaaatgcatatgagttgcactaaaaaagcgactcacattgttccgttataatgcctgaagtagatcacagaatatatcttcagggatcgcatatctattaagttactcactcttttctatttatgacatgcgcgtgtttgtataaatgtaaatgtgagtccttgttccactctcgtgcagcatcgctggtcatacgcgaacacgtaccaacagcaatggtgaggcggcatcaagagcagggatccgtcatttatccgagcattttaccccaaaaaccttttatttataagggtcattgcgaattatctgatgcaaagttatgttatgttaggcaaagtaatcttctattattaataagcacatcaaaacctttttgaatattaaataataattaattagcatcatcctcattcattaattccgcttaacaatagtttcacaccttgcccccattgcgacacctcggaaatcatcacgcagttaaactctccgtaatgaggaaatatcatcatcgcgtttcattagtgaattcttaaatgaggcattttcacacaattatcttacagataaaaaaaccagacttacaattaagaatcagaacaattcactatataacattgcatgtaaagcatatacacctcattattttgtcattattaagttattaacagcacaatcgagccttcccctctggcaaaatcttattctgcagaccttcaaaacaccgtcctgggggagtacattgttctaagctgacttccacggcagggagtggcgataacagcaaaaaaggtcaagattcatgtcccccattgaaaaatccagcaaattagagaatgtctgttatgacatccgtggtccggtgctgaaagaagcaaaacgcctggaagaagaaggtaacaaggtactgaaactgaacatcggcaacccagccccgttcggttttgacgcgccagatgaaatcctcgttgacgtgatacgcaacctgcctaccgctcaagggtattgcgattccaaaggtctttactccgcgcgtaaagccatcatgcagcactaccaggctcgtggcatgcgtgatgttaccgtggaagatatttacatcggcaatggtgtatcggagcttatcgttcaggcaatgcaggcattgctgaacagcggggacgaaatgttggttcctgcaccagattacccactctggaccgcggcggtttcgctttccagcggtaaagcggtgcattatctttgcgatgaatcctctgactggttcccggacctcgatgatattcgcgctaaaattacgcctcgtacgcgtgggatcgttattatcaacccaaataacccaaccggcgcggtatattccaaagagcttttaatggagattgtggagattgcacgtcagcataatctcattatcttcgccgatgaaatttatgacaaaattctctacgacgacgctgagcatcactcaattgcgccgctggcacctgacctgctgaccattacctttaacggactgtcgaaaacgtaccgcgttgcaggcttccgtcaggggtggatggtgttgaacgggccgaaaaaacacgccaaaggctacatcgaaggtctggaaatgctggcttcaatgcgcctgtgtgctaacgttcctgcgcaacacgccattcagaccgcgctaggtggttatcagagcatcagtgaatttattacccctggcggtcgtctttatgagcagcgtaaccgcgcgtgggaactgatcaacgatattccgggcgtttcctgcgtgaaacctcgtggtgcgctgtatatgttcccgaaaatcgacgccaaacgctttaacattcacgacgatcagaaaatggtgttggatttcctgttgcaggaaaaagttctgttggtgcaagggacggcattcaactggccgtggccggatcacttccgcattgtcacgctaccgcgtgtcgatgatatcgagctgtctttgagcaagttcgcgcgtttcctttctggttatcatcagctgtaatcttaatttcactgccggagattgcatccggcagcgttatcccgccacaatgacctgatgatgtcatcatacgtaaggtcactatgaaacagagccatttttttgcccatctctcccgcctgaaactcattaaccgctggccgctcatgcgcaacgtgcggacggaaaatgtgtccgaacacagtttgcaggtagcgatggtcgcccatgcgctggcagctatcaaaaatcgaaaatttggcggtaatgtcaacgccgaacgtatcgctttactggcgatgtaccacgatgcctcagaagtgctcaccggcgatctccctactccggtgaaatacttcaattcgcaaatcgctcaggagtacaaggctattgaaaaaatcgctcagcaaaaactggtcgatatggttccggaagagctgcgggatatctttgcgccgttaattgacgagcatgcatatagcgatgaagaaaaatcgctggtgaaacaggcagatgcactgtgtgcatatctgaaatgtctggaagaactcgcggccggaaataatgaattcttgctggcaaaaacgcgactggaagcgacgcttgaagcgcgtcgcagccaggagatggactacttcatggaaatatttgttcccagcttccatctttcgctcgatgagattagccaggattcaccgctgtaagcagccggagtctgcgtcgcatcaggcaataagcgccggatgcgacatcaggctcttgtcaaaacggaaacagcatcgggatcatcaccacacaaaccgccatcacgataatggtgaacggtacccccaacttcacaaagtcactgaagctgtaatttcccggacctaaaaccagtgtgttaacaggtgaagaaaccggtgtcataaaggcggcggatgctgccatcgccacgaccatcgcgaatggataaggcgacacccccatcgttttggcagcagccagcgcaatcggagccatcaacaccgccgtcgcggtattagagataaatagcccaataaccgccgacaagacaaacaaacaccccagcatcatatgtggcccgtaaccaccgccaatgtccatcagccctttcaccgccagcgcgacacctcccgttttctgtaatgccacagcaaacggcatcatcccaacgatcaaaataatgctcggccagtgaatggatttataggcgctttcagcatctatacagcggaatttccccatcagcaggcaggcgatgatagcggcaacaggattaggaatttcatctgtcagcattaacgccaccattagcaccagacagaaaatggcatggggtgcctggctgtgcgcgggtgatgcttcactcacctcttccggtaagttcagcgctacgaagtcgcggccctgtttggccagcataccgatcagtttccagttacccacaaccaggatgatatcgcccagcagcagaggctcatccgccagcgaaccttccagcgccacgccattgcgctttagccccaccacattcagtccgtagcgggtacgaaaaccaatttcgcgcaccgatttaccaatcagttctgactcaggaattaatgaaatctctgccatgcccacatcaagggcctggtcagaaaaatactcgccgcgcagtaccatcggctccagcaattgctcactacaaaattgccggagatcgacatcagccgcagacatatcaataagcaaaacgtcacgcgcgcgaaattcagaaaccccattaacgttcacgataacgcgacgaaaacgccgccagcgttcaacaccgatgacgttagcgccataacgctcacgtaatttgagatcatccagccgttgaccaatcattggcgatccggggcgaatagccagacgtcgcgcacgcccggtcagtcgatattcacggataagatcgcgaaaggttcgacgcgtccagccttcgcgctgcggggtctgggtatcccctttcagcatgaaacgcatcactaacatatacaaaatacccagcaccagcacgaccaggccaataggtgttacgctaaagaaactgaagccgtgatagccttcacgcagcaattcactgttgactaccaggttcggcggcgtcgccaccagcgtcatcatgccgctaatcagcccggcaaaacttaacggcatcatcagacgtgacggcgacgtttgcatacgcatggcaacgcttaacaccacgggaataaagatagcgacaacgccggttgaactcataaacgcgccaagccccgcgacggtcagcatcaacaaaaccaacattttgatttcactattgcccgcaactttgaccagccatgttcccattacggtggcaacaccggtacggaccaaaccatcgccaataataaacaaggcggcaatcaggacaacgttaggatcagaaaagccggaaaatacttctgggactgtcagcgttccgcttaatgcaaacgcgacaataacaaacaaagcgaccgcatccatacgcactctgcccgtcgcaaacaagacgatggcaacggccagtaatgaaagaacccaaatcaattcaccgttcacaacttatccttgttaattgagggggatgacttgattctgccataaaaaagccccgacgagacggggctaaatcatgatcaggtgtttcactgaataataacatcgccatttggctgtttggtcacagtaatttgctccagactgtggaggaccaaatcgacctcattcaggcgcggggtatctgccggagcgttaaccgcaatgacatgacaacccgccgccaggccagaaagcacgccagcgggagcatcttccaccaccacacactcctgcggcgcaagccccagcagctgcgcgcctaacagatacgcatcaggttctggttttccgcgcttcactcgctcagcggttacaaacacctctggtgcgggaagcccagctattttatggcgcgctcgcgctaccggcatggagccagaagtcacaatggcccacggaatacctgctttattcaaatgactgagtaaggcgattgcccccggaagcgcggtaataccttcggtttccgtggcctcgatgtgctccagacgcgtaaactcggcggcaatatcagcctcggatttgcccgccataaaatggcgcagagaggtgatcgcctgtttaccgtgaatgaaagccagcacctcttccggcgctaacccatgacgtctggcccagttgctccacgcccgttctaccgcaggcagggaatccaccagcgttccatcaagatcaaacagaaaacctttgcaccgcacgcgggcctcctcaggcattgataatttgattaatttcgttggcgctcaaatggtactgacgcgggcaggcatgccacacattaagcatgcgctgatatttttcccacattggcgtctgggcgttaaaaccgtgagttccggcgtcaaaatgggtatagcgcccttccacattaaccataaagcggacataaccgaggtaacgtgcttcagtggcggcgtcaaagccgaggaaggtgacacgacgttcatcgatggattgctggtcctgcaaattagaccaggaaacatgcaacgcatgatacatctccataatgtcgatgatagtgcggcaggtttcttctttcagctcgccaaactcgcgatccaattcacgcatctgtaatccgtaaccacgctcaataattgtttgcaggcgacggtaacgttcagcatttgccggatcgagcatagtcatcatcttgtactgattagacaaaataagacgttgcgcgttggtcatttccattgttgactcctgtatcactctactacggtgaaaaaaaagaaggctgagtatgccttcttttatatgcgtaatcaggggtcaattacaaatcatcaaggaaagttttatccagttgtttgaaggcgcgcttaagcgtgtcagctaatgcctggtaatcaggcttgccttcaacgggtgccaacacctgtccagactcctgcaatttaccgcgaacttcataaaaccagttaaggattgcagggggtaatggcgtgacagaacgcttgcccagccaccacaatccctgcatgggtaaacttaaggcgaacagggcagtggcaactgccggcccaagctgaccgcccagggcaatctgccagcagagagtaaatacggcgatcggcggcataaaacggatcgcataacgcgtcatcttgataacgcgattttcgacaaagaccggggcaaggcgtttttccagcggccacgtctttgagtaatgctgtccccggcgaaacaagctaaaaaaattaacagaacgattatccggcgttgacatgcttcacctcaacttcacatataaagattcaaaaatttgtgcaaattcacaactcagcgggacaacgttcaaaacattttgtcttccatacccactatcaggtatcctttagcagcctgaaggcctaagtagtacatattcattgagtcgtcaaattcatatacattatgccattggctgaaaattacgcaaaatggcatagactcaagatatttcttccatcatgcaaaaaaaatttgcagtgcatgatgttaatcataaatgtcggtgtcatcatgcgctacgctctatggctccctgacgtttttttagccacgtatcaattataggtacttccatgtcgagtaagttagtactggttctgaactgcggtagttcttcactgaaatttgccatcatcgatgcagtaaatggtgaagagtacctttctggtttagccgaatgtttccacctgcccgaagcacgtatcaaatggaaaatggacggcaataaacaggaagcggctttaggtgcaggcgccgctcacagcgaagcgctcaactttatcgttaatactattctggcacaaaaaccagaactgtctgcgcagctgactgctatcggtcaccgtatcgtacacggcggcgaaaagtataccagctccgtagtgatcgatgagtctgttattcagggtatcaaagatgcagcttcttttgcaccgctgcacaacccggctcacctgatcggtatcgaagaagctctgaaatctttcccacagctgaaagacaaaaacgttgctgtatttgacaccgcgttccaccagactatgccggaagagtcttacctctacgccctgccttacaacctgtacaaagagcacggcatccgtcgttacggcgcgcacggcaccagccacttctatgtaacccaggaagcggcaaaaatgctgaacaaaccggtagaagaactgaacatcatcacctgccacctgggcaacggtggttccgtttctgctatccgcaacggtaaatgcgttgacacctctatgggcctgaccccgctggaaggtctggtcatgggtacccgttctggtgatatcgatccggcgatcatcttccacctgcacgacaccctgggcatgagcgttgacgcaatcaacaaactgctgaccaaagagtctggcctgctgggtctgaccgaagtgaccagcgactgccgctatgttgaagacaactacgcgacgaaagaagacgcgaagcgcgcaatggacgtttactgccaccgcctggcgaaatacatcggtgcctacactgcgctgatggatggtcgtctggacgctgttgtattcactggtggtatcggtgaaaatgccgcaatggttcgtgaactgtctctgggcaaactgggcgtgctgggctttgaagttgatcatgaacgcaacctggctgcacgtttcggcaaatctggtttcatcaacaaagaaggtacccgtcctgcggtggttatcccaaccaacgaagaactggttatcgcgcaagacgcgagccgcctgactgcctgatttcacaccgccagctcagctggcggtgctgttttgtaacccgccaaatcggcggtaacgaaagaggataaaccgtgtcccgtattattatgctgatccctaccggaaccagcgtcggtctgaccagcgtcagccttggcgtgatccgtgcaatggaacgcaaaggcgttcgtctgagcgttttcaaacctatcgctcagccgcgtaccggtggcgatgcgcccgatcagactacgactatcgtgcgtgcgaactcttccaccacgacggccgctgaaccgctgaaaatgagctacgttgaaggtctgctttccagcaatcagaaagatgtgctgatggaagagatcgtcgcaaactaccacgctaacaccaaagacgctgaagtcgttctggttgaaggtctggtcccgacacgtaagcaccagtttgcccagtctctgaactacgaaatcgctaaaacgctgaatgcggaaatcgtcttcgttatgtctcagggcactgacaccccggaacagctgaaagagcgtatcgaactgacccgcaacagcttcggcggtgccaaaaacaccaacatcaccggcgttatcgttaacaaactgaacgcaccggttgatgaacagggtcgtactcgcccggatctgtccgagattttcgacgactcttccaaagctaaagtaaacaatgttgatccggcgaagctgcaagaatccagcccgctgccggttctcggcgctgtgccgtggagctttgacctgatcgcgactcgtgcgatcgatatggctcgccacctgaatgcgaccatcatcaacgaaggcgacatcaatactcgccgcgttaaatccgtcactttctgcgcacgcagcattccgcacatgctggagcacttccgtgccggttctctgctggtgacttccgcagaccgtcctgacgtgctggtggccgcttgcctggcagccatgaacggcgtagaaatcggtgccctgctgctgactggcggttacgaaatggacgcgcgcatttctaaactgtgcgaacgtgctttcgctaccggcctgccggtatttatggtgaacaccaacacctggcagacctctctgagcctgcagagcttcaacctggaagttccggttgacgatcacgaacgtatcgagaaagttcaggaatacgttgctaactacatcaacgctgactggatcgaatctctgactgccacttctgagcgcagccgtcgtctgtctccgcctgcgttccgttatcagctgactgaacttgcgcgcaaagcgggcaaacgtatcgtactgccggaaggtgacgaaccgcgtaccgttaaagcagccgctatctgtgctgaacgtggtatcgcaacttgcgtactgctgggtaatccggcagagatcaaccgtgttgcagcgtctcagggtgtagaactgggtgcagggattgaaatcgttgatccagaagtggttcgcgaaagctatgttggtcgtctggtcgaactgcgtaagaacaaaggcatgaccgaaaccgttgcccgcgaacagctggaagacaacgtggtgctcggtacgctgatgctggaacaggatgaagttgatggtctggtttccggtgctgttcacactaccgcaaacaccatccgtccgccgctgcagctgatcaaaactgcaccgggcagctccctggtatcttccgtgttcttcatgctgctgccggaacaggtttacgtttacggtgactgtgcgatcaacccggatccgaccgctgaacagctggcagaaatcgcgattcagtccgctgattccgctgcggccttcggtatcgaaccgcgcgttgctatgctctcctactccaccggtacttctggtgcaggtagcgacgtagaaaaagttcgcgaagcaactcgtctggcgcaggaaaaacgtcctgacctgatgatcgacggtccgctgcagtacgacgctgcggtaatggctgacgttgcgaaatccaaagcgccgaactctccggttgcaggtcgcgctaccgtgttcatcttcccggatctgaacaccggtaacaccacctacaaagcggtacagcgttctgccgacctgatctccatcgggccgatgctgcagggtatgcgcaagccggttaacgacctgtcccgtggcgcactggttgacgatatcgtctacaccatcgcgctgactgcgattcagtctgcacagcagcagtaatctcgtcatcatccgcagctttgcgctgcggatatctgaaccggaaataatcactatttccggttttttattctcttaatttgcattaatcctttctgattatcttgcttaactgcgctgcatcaatgaattgcgccatcccactttgcatacttaccactttgttttgtgcaagggaatatttgcgctatgtccgcaatcactgaatccaaaccaacaagaagatgggcaatgcccgatacgttggtgattatcttttttgttgctattttaaccagccttgccacctgggtagttccggtggggatgtttgacagtcaggaagtgcagtatcaggttgatggtcaaacaaaaacacgcaaagtcgtagatccacactcatttcgcattctgactaacgaagcaggcgaacctgagtatcaccgcgtacagctgttcacgacgggcgatgaacgcccgggcctgatgaacttcccgtttgaaggattaacctcaggatcgaaatacgggacagccgttggcatcatcatgtttatgctggtgattggcggcgcgtttggcattgtgatgcgtacaggaaccattgataacggtatcctggcgcttattcgccatacccgcgggaatgaaattctctttattcctgcgctgtttattctgttttcacttggcggcgcggtatttggtatgggagaagaggccgtcgcctttgccattatcatcgcaccgctaatggtccggctgggctatgacagtattaccaccgtcctggtgacctatattgccacgcaaatcggttttgccagttcgtggatgaacccgttttgtgtggtcgttgctcaggggattgccggcgttccggtgctttctggctccgggttgcgcatcgtggtgtgggttatcgccactctgattggcctgatctttaccatggtgtacgcctcacgagtgaaaaagaatcctcttctgtcacgcgtgcatgagtccgaccgcttctttcgtgaaaagcaggctgatgttgaacaacgtccgtttacctttggtgactggctggtattgattgtcctgaccgccgtaatggtctgggtgatttggggcgtgatcgttaatgcctggtttattccagaaattgccagccagttcttcaccatgggtctggtgattggcatcatcggcgttgttttccgccttaacggcatgacggttaataccatggcttcatcctttaccgaaggggcgcgaatgatgatcgcccctgccctgctggtgggtttcgccaaagggattttgctgctggtcggtaatggtgaagcgggtgatgccagcgtgttaaataccatcctcaacagcattgccaatgccattagcggtctggacaacgcggtcgcggcctggtttatgttgctcttccaggcggtatttaatttcttcgtgacgtccggttctggtcaggcggcgttaaccatgccgttactggcaccgcttggcgatctggtcggtgttaaccgtcaggttaccgtgctggcgttccagtttggtgatggcttcagtcacatcatttacccaacctcagcgtcgttaatggcaacgctcggtgtgtgcagggtggacttccgtaactggctgaaggtgggcgcgaccctacttggactgctgtttattatgtccagcgtcgtagtgatcggcgctcagttgatgggctaccactaaaaatgttaagagccgcaattgcggctcttttttcattctgccgtttcagtctctacggcttcatttttggcattgcgcttcatccacaacgctagcgctttcagcgagtctggagtgaactcatcgcagcgtgcggtgatttcttccggcgtcagccagcaaacttcactgacttcatcttcctgtagtgcgaagggaccgtgagagacgcagctgaacaatgcgccccagacacggcaatttttatcttcgaaatagaactgcccgtgctcggcaaaggggacaccggcaatgcccaactcttcttccgcttcgcgacgcgcggattccagcagttgctcatcggcctggactacaccgcctgcggtcgcatctaacatgccgggtaaaaagtcttttgtctcggtacgacgctggaccagaattttgcccatgccatcatgcacgacgatgtaagttgcacgatgacgcagacactgtgcccgcatttgttcccggctggcttgtgcaatgacttcgttctcttcattgacaatatccacccattcagtacttgccaaacgacgctgttccattatcaggaaaccttctttttctggcgctcttacggcgcattttgagttgtgggtaaattacggattaatcgcgacctgcgcaatgatactttgatcattgagtgcgattacactaagtacgtcattatccagcatgccataactcgccggattaccgcctttcggaatactcaccgagccggggttgaagtggaaaatctccccccgctgttctgccactggcagatgggtatgaccgtacaccagcacatcgttctggtttaaagcaggcagattttccgggccaaaaagatgaccatgcgtcaaaaacagacgttgtttttccagtaatacctgttgccacggcgcggttatcgggaaatgcagcagcatttgatccacttcgctgtcgcagttgccgcgcacagcgataaccttatgtgccacttcattaagccgttcagcgactttggctggcgcgtaaccctccggtaaagcattacgcgggccgtgattcaacacgtcgccaaggatcaccagccactgggcaccgctttgggcaaacaactccagaacacgttccgtcgccggtaacgacccatgaatgtccgatgcaaacatcagtttcatcactcactcctcgtcgaaaaaacgtaagctatgatactggattctgtcgttgctatcagccagattgcttcgccgaaagtgcaataaaacgctggacagacgctcgctgccactggaatgttgcataatccaccaggcgttctggcacctcatcgccatgtagtaccaggcggttaatcattagcgccagatcagtatcagcaatgcaccattcaccaaataaattcggctgacccagtactaacaaatgttctgccatcgcgaacagtttctctgcactggcttttccctcggccgttagtggcgcttttttcgcccccgcaaagacaacatccgtcggacgctcttcgcggatgggcatcagatcgctgcgcagccaggcctgaatctgtcgtgcacgcgcacgattttctaaatcaagcggataaatacgttcccaggtcggtggcgcaaatcgatcttccagatactccgcaatggcagaagattcactcaactcaaaatcatcgatttgtaataacggcacacggcgtgtctgaccgtaaccttgccacgtcggctgcaaatgttcaccgctgtcgaggtcgatggtcttgatatgaaacgacaggcctttttcctgcaacgccacccaggcggataacacataaggggagaaaaagtgggcatctgaccaaagcgtgatagcgggtttactcattatgtcctcggcaataaagggggctggctatcaaactatagagcctttttgtcactgtcacgtgacgaatactcacgtaagtcgccgcgctttctatacttgtggtgttcagatgattaaacaaccggagctgcaatgatcgatctctatttcgccccgacacccaatggtcacaaaattacgctgtttctcgaagaagcagagctggattatcgcttgattaaggtagacctggggaaaggcggtcagtttcgtccggaatttttgcgcatttcgcccaacaacaaaattccggcaattgttgatcattctcctgccgatggcggcgaaccgctaagcctctttgagtctggtgccattttgttgtatctggctgagaaaacaggactctttttgagtcatgaaacgcgtgagcgcgccgccacattacagtggttattctggcaggtaggcggactggggccgatgcttgggcaaaatcatcattttaatcacgcagccccccaaaccattccttacgctattgaacgttatcaggttgaaactcagcgtctttaccatgtactgaacaagcggctggaaaactcgccctggctgggaggcgagaactacagcattgcggatattgcctgctggccgtgggttaatgcctggactcgccagcgaattgacctagcaatgtatccggcagtcaagaactggcatgagcggatccgttcgcgccctgccaccgggcaggcactgctaaaagcacaactcggtgatgagcgttcggatagttaacagaaacaggttctcgtgtattatttcatcctaagtaaaacaacggagaacctgcaatggcacaacctgccgctattattcgtataaagaaccttcgtttgcgtacgtttatcggaattaaggaagaagaaattaacaaccgtcaggatattgttatcaatgtgacgatccactaccccgccgataaagcgcgcactagcgaagatatcaacgatgcgctgaattatcgcaccgtaacgaaaaacattattcagcatgtagagaataaccgtttctctttgctggaaaaattaactcaggatgtgctcgatatcgcacgtgaacatcactgggtgacgtatgctgaagtggagatcgataaactgcacgcgctgcgctacgccgattcggtatccatgaccttaagctggcagcgttaatcgccatatcgggaggctgcatgaacatagtgatcaccggagggacaggattaattggtcgccatttgattccgcgtttgctggagctgggccatcaaattacggtagtgacgcgtaacccgcagaaagccagttccgttctcggccctcgggtgacactatggcaagggcttgccgatcaaagcaacctcaacggcgttgatgcggtaatcaacctggccggagaaccgattgctgataaacgctggactcacgagcaaaaagagcgtctctgccaaagccgctggaatatcacgcaaaaactggtcgatttgattaatgccagcgacacgccaccgtcggtactcatttccggctcggcaacgggctattatggtgacttaggtgaagtggtggttaccgaagaggaaccgccgcataacgaatttacccataaactctgcgctcgctgggaagaaattgcctgccgggcgcaaagtgacaaaacgcgagtgtgcctgctgcgtaccggtgtagtgctggcaccggatggcggtattctcggtaaaatgctgccgccgtttcgtcttggcctgggcgggccgattggctctggtcggcagtatctggcctggattcatattgatgatatggtcaacggtattctctggctgctggataacgagctgcgcgggccatttaatatggtttcgccctacccggtacgcaatgaacaatttgcccatgcgctcggtcatgcgctgcatcgcccggccattttgcgcgtccccgcgaccgccattcgactgttaatgggcgaatcttcagtactggtattaggtggacaacgcgcgctgcctaaacggctggaagaagcgggttttgcgtttcgctggtacgatttagaagaggcgctggcggatgtcgttcgctgatgtggtttacagcaaacatccgccagttaactcccggtgttacaggattagtggctttgcgcgataagatcgtctggtgaaagtcgggtcaccatcataactaactctctgtctaaacctctatccagcatctcctgagcaatacgcagggcttcttcgtgtttgccctgcattgcgccttcttcacgtaatctgtcagcaatggtcatcagtttctccttttcttgtggtgcgcgttccgctatctcaccaataaatgcacgaaaacgctgggcatcccctgtttgtaatacgtaattaaacagggcttttagctgtctgtcattagtgttccctgtaactagcagcgaaacaatttggtcgactaatcccaacagatcgcgctgacgaatatgtttctgaattaactccaacagcgccattttgcggtgttgcataatctcgtcatccggcaccacggtaatatccaccaacggaaaagccgatgaatatattttgcgggctatagcaggctcggcaaattcatcaagccagcagagtgaataaggataaggacttctgcaaccatgataaaacagcatcgggagcaccaatggaagctctttatagcccgcatcaagatggttttgcattgccgcaatggaataacgcatcatgcgaaaagccattaattcttccggcttactttggtgctctatcactacataaatataacccactccctcctgcgttttcacagaccacaagaggtcggaataatattgccgcaggtcttcatcaataaaactgtttggttccagtttaagcgtcgttaaatcacacagtttgcgcagcggcgcgggaagatgaatatcaataaaatcccgcgcggtgtctggatggcgtaaaaaagatttaaataccgcatcatgcggcgtggaagttgtcgatattgtcatggcgttccgtcacccctcaaatttaagatgacgcgacaataaccacgattaacacccaatgcagcaggcagtttttatctttggacagcgaattcagaagtatttttagcggactgtaacttttacatttcagcggaagctgactcgcaaattccccatgaaaatactccggcagcgttagccaccggagaggaaattatttcagcgatcccttaaggaaccgttgcagacgagggctttgcgggttgccaaataactgctccggcgcgccctcttcttctattttcccctgatggaggaaaatgacatgagtagaaacatggcgagcaaagcccatttcgtgagtcactaccaccatggttttcccctcttctgccagttgctgcataatacgcaacacttcgcctaccagttcaggatcgagcgccgaggtaggttcatcaaacagtaaaacttccggttccatcgccagcgcccgcgcgatagaaacacgctgttgctgaccgccggaaagatgcaccggatatttcccctgcgcacgttcgtctatcccgacttttgccagatacttcaccgcccgctcgcgcgcttcctgcttgctcaggcccaacacctgaatcggcgcttccatgacgttttccagcaccgtcatatggctccagagattgaagtgctggaataccatcgtcaggcgtgtgcgcagtaagcgcagttgatttttatcggcgactttgagttgaccgtctttgtcgcgcaccagattgatcgtctggccattgaccacgatcgacccttcactcggtttttcgaggaagttaatgcagcgcagaaaggtacttttccccgatcccgacgatccgatgatgcttattacatctccggcattcgcttgcagtgatacccctttcagcacttcatgttcgccgtagcgtttgtgcaaatcgataacgtttaatttattctcggacatcgtattctcagtgcgttgaagaaggtttcacatgctgcaaccagcgtttttccgctctgcgaaagaggctgatcaggacataagagatgattaaatagagcaccgcggcaatgccgaaggcggtaaaaggttgatacgtggcggcgttaatatcgcgggctattttcagcagatccggcaccgtggcagtaaatgccaacgcagtagagtgcagcatcaggatcacttcgttgctgtatgccggtaacgcaatacgcagcgcagaaggcaaaataatgcagcgatacattttaaaagtcgagaagccataggctctggcggcttcaatttccccatgcggaaccgaacggattgccccagcaaaaatctcggtagtgtaagcgcaggtgttaagcgtcagcgccagcacggtacagttcaggccactgcggaagaaagcgttaaggaattcggttcccttaacaatctcaagcgtgtacatgccggaatagaacaccagcaactgaacatacagcggcgtaccgcgaaaaatataggtaaataaccagattggaaactggatgtatttattactggagacacgaccaatcgccagaaacagcgccaggactccgcctatcactaccgacaaaataagcagccacagagtgatcgccacaccagtaaagcgataaccgtcggtccacagcagcggtttccagtattcatgtaagatttcgatcacaggtcagccctcttcacacccacggagtagcggcgctcaaggaacagcagcacaccattggaaacagtggtgaaaaccaggtaaatcacgccacagacgatggcgaaatagaacggttcccaggtacttttgcctgccagttgggtggctttgaccacatcttccaggccgagtaacgaaaccagtgcggtagatttgaggatcacctgccagttgttgccaatgcctggcagggcgtaacgcatcatcgacggaaacatgatccgccgaaacacttgcccacgagtaaaaccgaacgccgtcgccgcctctatatgtcctttcggcactgccataaaagcaccacggaacgtttcggtaaaataagcaccgtagataaaaccgagagtgataataccagcgaccatcggatcgatatcaatctgcccgacgcccatcgcctccgtcaccgtgtttagcgcaatctgcaaaccgtagaaaatcagcagcatcaacactaagtccggcacgccacgaatcagcgtggtgtacccttcgaaaatcagccccgaaagccgattttgcgagagcttaccgccagcgccaattaaaccgatgattacagcgagcactacagagctgatagccagctccagcgtgacgagcgcaccctgtaaaataacacctgaaaacccatacaacatgctgcctgtcctgtcgtgtgtggtgaattaccgcctcttgtctccctccggttacccgaagggagcgggctttctttcaccgatggcgattagccaccataaacatcaaaatcgaagtactttttcgctaatttctcgtaagtaccgtcagcgcgcatttcggcaaaggctttgttcagtgcttcgcgcagttcgttatcttctttacgcaggcccatgccggtccctacgccaaacagtttttcatctttaacagacgggccaccgaatttgtaatctttaccgacaggttgtttgaggaaaccttcgctggcagcgacctcatcctggaacgcggcatcaatacgtccggcagtcaggtcagaataaatgttgtcctgcccctgatacgagacgatttcaatgccttttggtgcccaatgttcattaccgaacgtctcctgggtggtgccctgcaatacgcctacccgtttgcctttcagcgactcgactgtcggctgaatgtcagaatttttcgccaccaccaaacgagaatcggcagcgtacagtttgtcggtgaaggctatttcttgctgacgtttttccgtaatggaaagcgatgacatgatggcgtcaatcttcttcgcttttaaggacgggattaacgcatccagcggattttcgacaaacgtacattgcgtattgatgcgtttgcataattcctttgccagatcgatatcgaagccaaccagttcgccttgtgaattttttgattcaaatggcgcataggtcgggtcggtaccgatgcggatgttttgcggaatcgcagcaaacgccgcagttgcgctggagaaggccagaaccagagagagcgatagcaccagttttttcataatgtcctcaactgacagtctttttatagggaatatttacaggtttgttacacttatcgtgccataaaattgaccatcaaggcaaaatatcccgccccgttagacgtattatttttcattaaaaatgcttaagtatgcatttcaatgcaccacgatagtgcaacaaacctggcgtgcaccatgatgatcattccatcaggtacagcttcccagcgacgtatcagtcaccgtagacattaaagtcgaaatactttttcgccatcttgtcgtaggtgccgtcctgacgcagctcgccaagcgccttattgaaggcagccgtcagttcagcatcatctttacgtagccctacaccggtgccatcaccgaagtattttttgtcttttactgatgagccagcaaaggcgaaatctttaccagcaggttgcttgaggaatccttcgctggcagcaacttcatcttgtaacgcagcatccagacgtcctgcagccagatcggaatagaccaaatcctggttggcataggccaccacatccacgcctttactacgccaggtctcgttagcgtaagcttcctgggttgatccctgcagcacaccaacatgtttacctttcagtgaatccagcgttggctgaatcggtgaacctttggccgcaatcaaacgagaatctgcggcgtacagcttgtcggagaaggcaatctcctgctgacgtttatcggtaatggaaagcgacgaaataatagcgtcgatttttttcgctttcagtgaggggatcagcgcgtcaaagtcactggcaacccaggtacatttcacctgcatccgtttgcacatctcgttaccgagatcgatatcaaagccaacaaaatcacctttagcatctttcgatgagaacggtgcgtaggtggtatcggttccgatacgtaccgtctccggtagcgccgcatagctggaagccgctgtggagagaccgactaacaaagacagagcgagaatcgacttcttcatacataaccctcaagtgaaaatggcttttttatgttgtgtattgtgttgtgtgtttgcaggctctttcatgcaggtcttatgccatcttgacgacaacagtaacattcaacgttaaatatgttaataagacgttgcattattgtcctgaagttgaagatagcaggtatagcggttgaatcgcagcgtttcgattgaatggcagaaacaaaatgtcgaggatttgatcgcggttgcaaaattgccctgaaacagggcaacagcggagttatgcgccctgccagcgggcaaagagatcttcaggaagggttatcgcaaactggtcaagaacacgattaaccgtctgatttatcacatcatcaagggattgcgggcgatgataaaacgccggaacgggaggcataatcaccgcaccgatttctgccgcctgagtcattaaacgcagatggcctaagtgcaatggtgtttcacgcacgcagagcaccaacgggcgacgctctttcagcaccacatctgccgcacgggtcagtaagccatcagtatagctatggacaatgccggaaagggttttgattgaacagggtaaaatcaccatccccagcgtctggaaagaaccggaagagatgctggcggcaatatcgcgcgcatcgtgcgtgacatcggctaatgcctgcacttcgcgcagagaaaaatccgtttcgagggataaggtctggcgcgctgcctggctcatcaccagatgcgtttcgatatctgtgacatcgcgcagaacctgtaataagcgcacgccataaatcgcgccgctggcaccgctgatgcctacaatgagtcgtttcataaatagttgccctgtcagacttgcaggcagactttgcaggatttcggcgggagttgcaagtcagggtgccagaccggcaccctcagcgaaggcatcatccttcgttatgcatttcgagattttccacttcgttctgacgttgcactgctttggcgtcatcattacgtaacgtatcgaggaaatcgaggtagccctgatcaacatctttggtgacgtagacgccgttgaacaccgagcattcaaactgctggatatccggattttcagcgcgaacggcgtcgatcagatcgttcagatcctggaaaatcaacccgtcagcaccgatgatctggcgaatttcatcaacttcgcgaccgtgagcgatcagttccgtggcgctcggcatatcaataccataaacgttcgggaagcgaatttccggtgccgcagaagcgaggtacactttcttcgctccggcttcgcgtgccatctcgataatctgctcagaagtggtgccacggacgatggagtcgtcgaccagcaggacgtttttatcgcggaactcggcgcggttggcattcagtttacggcgcacggacttacgacgcagctgctggcccggcatgataaaggtgcggccaacatagcggtttttaacgaagccctggcggtacggtttgcccagaatacgagcaatttccagcgcgatatcacacgaggtttctgggatcgggatcaccacgtcgatatccagatcttcccattcgcgggcaattttctcgcccagtttcgtgcccatattcacacgcgcgctgtaaacggaaattttgtcgataaacgagtccgggcgggcaaagtatacatactcaaacaggcacggattgctgaccggattgtcagcacattgacgggtaaacaactgcccttcttcagtgatgtaaatcgcttcgcccggcgcgacgtcacgcaggaaatcaaagcccagcgtatcgagcgctacgctttcggaagcgaccatatattctgtacggttctcgtcaatatcacgttttcccagtaccagcggacgaatcccgtttggatcgcggaaagcaaccataccgtggccgataatcatcgccacacaggcatacgcgccgcggattaagcggtttgtggcagcaatggcagcgaaaatattgtcggcttccagcgggtagtggcggaagttgtccagctcgctggcgaagatattaagcagaatttccgagtcggaagtggtgttgatgtggcggcgtttttcttcaaacagttttttacgcaactcgtgagcgttggtcagattgccgttgtgggcaagcgtaatgccatacggggagttaacgtaaaacggctgcgcttcagaggcgctggagctgccagccgtggggtaacgcacatgaccaatgcccatattgccctgcaaacgctgcatatggcgagcttcaaatacatcgctcaccagcccgttcgctttacgcaaacggaagcagttattggcatctatggtgatgatgccggcggcatcctgaccgcgatgctgaagcaccgttaaggcatcataaatcgactggttaaccggcataacaccggcgataccgacaataccgcacatacgtctttttcctcgttaagccacatctcagagcacttacgctctgggcaagaaacttgacgagctttgcagataatcaaaaaaacatctgatgataaaactgaattgcgggatcagctgtgatttgctccagtcttcgcttttcgacaccccggtaaaggagtcgagaaagaagagaatggcagcaacaatcaacacaccgcgcaacgcaccgaaacagacgcccagcacccgatcggtgcctgacaaccccgttttctccaccaactggcctatcacgaagttcacgatagcaccaacgatcagggtagcgataaacagtaccgcgatggcaatcccatttcgaaccagttcgtcttcaaagcccgtaaaccagactgacaggtaagtgtagtaatgactggcaacaaagaaagcacaaccccatgtcaccagcgataacgcttcacgaacaaagccgcggatcaggctaaccagagaggaaaaagcaatcaccgcgattatggcgtaatcaatccagaccatatgtgtcccacgattttacgccctgtcatcctgttcggggcgcattctaacagaaaaagaaaacgtttgcgtagggatttccttcccgcgcatcaataaaaatggcgctgaaaaaatattcaacgccatcgactttttatgcctttgcggcatcgggcaatgcgtgtcggatgcggcgtaaacgccttatccgacctacggttctacccctgcgtaggcctgataagacgcgccagcgtcgcatcaggcaagaccgtattaattcggcgtatagcccattaccacgccacttaagccagaaagttgcttcaactcacccagcgaacctttcagcttatctttcgaggcatccggcccaaccagaatacgggtaattttaccctgcactggcgtggatggcgacgtataaacccgataaccggcaccgcgcagcttaccgacaatctcattcactttatcggcatttttcagcgcacccagttgcacaacataggctttacccgtcggtgcagctttttcttccacgaccggcttcggttctggcttcggcgcaggtggtgcttcaacctttggtttaggcggctccaccggtttcggcttcggtggggcgaccggtgcaggttccggttcaaactcggtgttattggctgcaatagtggccggatcgagcgacggtgctgcggcatcacctgcccgcacctcttccgctgcgccttccggcggctgcgtcggtaacgcctgggtggcggctggcatcatatcaggctcatcacgatcgcccgctttcggcaccagcgggatagccgcgaactcatcctgataatgttttttctgcccgtccagcagccctggaagtacaatcacccccagcgccaccagcacgatcgtgcccactaaccgattctgaaacttacttgccaccgcttctcctcgcgtcaatcacttccatgacatgtgcgaccgtgtggaaagaaccacacaccagcacggtgtcttccgctttagcgtccgccattgcggcatcccatgcctgcgcaacgctatcaaatgatttgccgttacccaaatgctcaagcagttgttctgccgtggcaccgcgcggcccttccagtggcgcacaataccagtcatcaaccacgcttttcaaccaggccagagttccggcaatatctttatcatgtagcataccgataaccgccagcacgcgcccgtttttcggtagcgctttcatacgcccggtgagatattccgccgcatgtggattatgcgcgacatcaaaaataacgcgtggcgactcgctcacaatctggaaacgtcccggcaaaattgcgctggcaatcccgtcgcgaatggcattttcactgacttccagcccgctggcacgcagtgccgccagcgctgttgcggcattcggttgcgggacaagcggcaacggcagattttccagcgtgccgtgagcatcgctaaacgcccagtcatgatcggtgacggaatagttccactcaacgccccgacgttgtaacagtgcacctttttcctgcgccacatcagcaatggtagaaggcatttccggctcaccgacaattgccggtttttcgctgcggaagatgcctgctttctcgcgaccaatactttcgcgatctggacccagccagtcggtatgatccagcgcaatactggttactaccgcgacatcggcgtcgacaatattggttgcgtccagacgaccgcccagccctacttccagaatcaccacgtcaagttgtgcctgcttgaacagccacaacgccgacagcgtaccgtactcgaaataggtcagggaaatatcaccgcgtgccgattcaatctccgcaaaagaggcggtgtgggccgattccggcaattcctggccctgcacacgtacgcgctcggtataacgcaccagatgaggcgaactgtagacgcccactttgtaccctgccgccatcagaatcgactccagcgtacggcaggtggtgcctttgccattcgtacccgcaacggtaaacacaaatggcgctggtttcaggacgccaagacgcgccgcgaccaggctcacgcgctcaaggccgagatcgatagttttactgtgcaggttttccagataagaaagccacgaagccagaggcgacgcggcttgaggagtgcgtttgataatcatggtatccgctgattcgttacggtgagaatagcaaaagggcagagccagtggccctgcccttatcagttatcaggcctcaggttcctgatccggtaccgggggtaccactacgccttcacgcggcgcttcaggattcggcgctggcagattcatcaacttcgccagaatgctcgccagtttcaggcgcatttccggacgacggacgatcatgtcgatcgcgcctttctcgatcaggaattcactgcgctggaatccaggcggcagtttttcgcgaacggtctgttcgataacacgcggaccggcaaagccgattaacgctttcggttcagcgatgttgagatcgcccagcatggcgaaacttgcagaaacaccgcccatcgtcgggtcggtcagcacggagatgtacggcaagccgcgctcctgcatttttgccagtgccgcagaggttttcgccatctgcatcagcgacatcagtgcttcctgcatacgtgcgccaccagaggcggagaagcagatcagcgggcagttatcttccagcgcctgctcaacggcacgcacgaaacgtgcacccacaacagaccccattgaaccgcccataaaggcgaactcgaatgccgcagcgacaaccggcattccatacagagtgcctttcatcaccaccagcgcatctttttcgccggtttctttctgcgcagatgccagacggtctttatacttcttggagtcacgaaacttcagcacatctttcggctcaagctcgctacccagctccacaaggcttccttcatctaacaggctatgcaggcgattacgcgctgtcatacgcatgtgatggtcacacttcggacagacctcaagattacgttccagctcagcgcggtataaaacctgaccgcagctatcacacttagtccacaccccttcaggaatgctcgccttgcgggtgggagtaatgttgcttttaattcgttcaatccagctcattagggacctttctgtctgaacctggttcgatgccagttttatctttggggacgcataatgccatttttgcccccaacagaccatgaatgttgcacattaaaacataacagcccgaaactttggataaaaaagtggtcgaaccgcggagttactttttattttgcggcgcgtgccgcagcgcgtttgtgacggattatttcgatgacgcccggcaaaatagaaaccacaataatcccgacgatcagcagcttaaggttatcctgaaccatcgggattgtaccgaagaaatagcctgcgtaggtaaaaagcagtacccacaacagtgcgccgatcacgttataagcggcgaaatgacggtacgacatgtggcccattcccgcaacaaacggggcgaacgttctgacgatcggcacaaaacgggcgagaataatcgttttgccgccatgtttctcataaaactgatgggttttgtcgagataactgcgacggaaaattttcgaattgggattactgaacaacttttcaccgaacaaccgcccgatagtgtaattgaccgcgtcacccacaatcgcggcgatcagcatcagcaccaccatcatatggacgttgagatcgttggtttccagtgatgccaacgctccggcaacaaacagcaatgaatcacccggtaaaaacggcgttaccaccagaccggtttcacagaacaaaattaagaacaaaatggcataaacccagacgccgtactccgcgaccagctctgccagatgcacgtcaatgtgcaggataaaatcgatgaggaaataaatcaggtccatatttgcctatgccttgtactcgtcatctttcaggctgtaactacgttggctacagcctgaaatgttccgagcattattctcgttagtccgccagaaatagcgggcccattggcggttttggaagatcataccggtcagggtaatccaccgcgaccagatacagcccttccgcttttgccgttgctgccgccagcgttctgtcctttgccgccagcaactctgctatccagctctccggctggttgtgggcaccgacttccatcaggctgccgacaatattcctgaccatatgatgtacaaaagcattcgctttaatatctaccaccacataaggaccgtgacgcgtgacattaatatgcataacgttgcgccacggggttcgggactggcactgcaccgcacggaacgaggtgaaatcattctcgcccagcaagcattgcgcagcccgatgcatccgttcagcgtccagcggttcgtaaaaatgggttacccctttactcagtaccgccgggcgcagccgatgattgtagatgatgtagcgataacggcgagccgtggcgctaaatcgggcatgaaaatcatcaggtacagttttaacccaacgcacagcgatgtcaccaggtaaattcgcatttacgcccaaggtccacgccgcgtctttgcgcagcgcggttgtttcgaaatgcacaacctgcccggtaccgtgtacccctgcgtcagtacgcccggcgcagaagacggtgatgggttcgttcgccacctgggagagcgccttttccagcttctcctgcacactgcggacttcgttctgccgttgccagccgtaatacttactgccgtcgtactcaatgcccagcgcaattttataaactggcggttgttgctggtcggacattagtacagatactcctgcaccagtttctcggcgatttttactgccatcagcgcgccgccaaagcgaacgttatcggccaccgaccagaactggacttgctccggcataccgtagtcattacgcacgcagccaacagaaagatgcggcgtacccgaagcatcacctacctgagttgggaattcgttctcttcagagagcacaatatcttcgccttgaacaaacgcatcacgcgcttcttctgctgccagtggacgcagagcttcaaagttgaccatctgggcatgaccgtagaataccggtgcctggacgacgctagccgaaatcatcagcccttcgtcctgcaggattttgcgtacttcgtcaacgatacgacgttcttcacgcacgctaccttcgctatccggcagtaacggcagcatgttgaacgccagctgacgcccgaagaaatcttcttcgtcaatcggaatgccgttgagcaatttcgcactctgccccgctaacgcatcgaccgcttttttgccctgggcggaggctgaaatcaggctggtaacgctgatacgtgataaaccgccctgatcgattaacggtttcagtgccgccagcagctggctggtcagactgtctggtacggcgatgacattccggttccggtaatctgtcagtacaaacgggtttacttccggcaccaccagcggtacgtcgggttcgagagcaaacaatccactgctgtcgatcaccaggcaacctgagttggtcgcttcttcaacccaggcagcggtagcttctttgcctgcgacaaaaaatgccagctgcgcctgcgtccagtcgaattcagcggcatcctgcacggtgattgtcttaccaccaaagcgcagttgttcgcctgcgctttcgttacgtgccagtgcataaatttccccaaccgggaactgacgttcagccagcgtttcaagcagggcttcgcccacagcgccagttgcgcccaggacggcaatgttccagccttcagacatggtggtttactccagaaatagcaaagctccctgccaatgttacagcagagagcatgaagaagagattaacgtgccggatgatgaacggcgttaaaacccagtttacacagcaatgatgccgcactggcgtcatcacaaattacatacagagatgaccattcacggcgctcaagatagtttttgcgcagtttatcgaactcacccggtatcccggcgactttacgcagcggtgcgtcatcgcggcgcacatcatacaccaaatgcaccagccttttcagcgtcggttgatcgagcgggccatgcagcgtaatgcgaccaaactctggcgcaggcagtaatgtatccagcgcaacgtgctgttcatgcccaataaacttgctataagcttcaaacacttgcgtagtaccgcgtgctttaccttccagggtatagcctgcgatatgcgacgtgccgatatccacttttttcagcagctcgacgttgagttccggttcgccttcccagacatccagcactacgcttaacttctggccttcattcaggcaggtcagcaacgcagtattatcgacgactgcgccacggcaggcgttaatcagaatcgctccgggcttcaggctacggatcagtttttcatccgccagatgtagcgttttgtacggaccatctttaaagagtggcgtatggaaagtcagaatatccgcgcgctggactaactcatccagcgagcggaaatcaccctcatccccacggtcggcgcgaggcggatcgcaaagtaaggttttaatccctaacgcttccagtcgcgcctgcaatcgacgtccaacgttaccaacgcccacgatccccaccgtacggtcgtacagtgaaaatccatcgcgttcggcaagcatcagcagggaggagaaaacatattccaccaccgcaatcgcattacagccaggtgcagcggaaaaaccaattcccgcctgcttcaaccatgcttcatcgacatggtcggtccccgcagtggcagtgccaacaaatttaatgggttttcctgccagcaaagattcattcactttcgtgaccgaacgcaccatcagcgcatccgcgtctgccagttgagcgacggggattggacgcccgggaaccgcggtcacctcacccaaacggctaaataagtcgcgggcataaggcatattttcatcaacaaggattttcacgtttgtgttacctgtatgagacgagagttaaccggacaagtgtgccataatctcgcggccaggcatacttgcgaagatttcaggtataaggatacgtaatgatacaacctatttccggccctcctcctgggcaaccaccaggtcagggagataatctgccgtctggcacgggcaatcagcctttatccagtcagcaacgtacttcgctggaaagcttaatgacgaaagtgacctcactgacgcaacagcaaagagcagaactgtgggcgggtatcaggcacgatattggtctgtcgggagattcaccgctgctttcgcgtcacttccctgccgctgagcataatctggcgcaacgtctgctggccgcgcaaaaaagccattctgcccgccagcttttagcgcaattaggggagtatttacgtctggggaataatcgtcaggcggtcacggattatatccgtcataactttggtcagacgccgctgaatcagctctcaccggagcaattaaaaaccattctcaccctgttgcaggaagggaagatggttattccgcaaccacagcagcgcgaggcgaccgaccgtcctttattaccggcggagcacaatgcgctaaaacagctggtgaccaaacttgcggcggcaacgggggaacccagcaaacagatctggcaatcgatgctggaactttccggggtgaaagatggcgagttaattccagcgaaactgtttaaccatctggtgacctggctacaggcgcgtcagacgctaagccagcaaaatacgccgacgctggaatcactacagatgacgctaaaacaacctttagatgccagtgaactggcggcgttatcggcatatatccagcaaaaatatggtctttctgcgcaatcatcgctttcttctgcccaggccgaggatattcttaatcagctttatcaacggcgggttaaagggattgatccgcgtgttatgcaaccgctgcttaatccttttccaccgatgatggacacgttgcaaaatatggcaacgcgtcccgcgctgtggatactgttagtcgcgattatcctgatgctggtctggctggttcgttaaccccgacgaaatgacagtatcgtgacaataatacccagcaccgcagagatcgccccggcaagaaataccgaagagtaaccaaacgtggtcgccagcattcccgccagcggcccggagacgccgagggcgatatcctgaaacgcggcgtaaccgcccagtgcggtgccgcgaacttgtgaggggacgcgtttaaccacctccacgcccagcgcaggaaagataagcgaacatccggctccggttaacgccgcgcccgctaatgcgacccatgcacctggggcttgccagagcagcaacaagcccaccgtttctacaagcagagagacaatcgccactttcacgccgccaaaacggtccggcatccagccaaacatgacgcgcatcacgacaaatgcgccgccaaacgcggtaagagtaaagcccgccatcgcccatcctttgctggcaaagtagagcgaaacgaaagtcccgataacagcaaaaccaacgccttgtagtgccagacctaaccctggtttccagataagcccgacaacgctccacagcgatggacgttctcccgccagggccggtactttgcgcactgtgccgttacaggcccacgccagtacgggtaataccattgtggtgatcgccagtgcggcaaaaccgtaatggctatgaatcaacaggccaagcggagcaccaacagcgagggcaccgtaaatcgccattccgttccatgacatcactttgccagagtgttttggccctacgatgcctagtccccaggtcagagcgcctgtcagtaactggctttcaccaaagccaagaatcaaacgcccgacgaccaacagagcaaatttgaacggtgcggagacaggcaaaatcgccgccagcagcaacgcgccgccagccagaccacaagctaacattccctgaagcgccgaacgttttgcaccatattgatcggccagtcgcccggcgtaaccacgcgtcagcaccgtagccagaaactgaatcccgacggcaatgccgaccatggtattgccatagcccagttcatgatgaacaaacagcgggataaccggcaacggcaaccctacggtcatgtaggtgagaaaaaccgcaaaagcgatgcggaagagcgaaaaattggcagaagatcgtgtttcggtttggcttacagcagtcatgcattactccagaatgcagcgcaaggcgaggagtatccccgtctcatctctctggtttcagggttacggtgcgttggcaggatttaacgcgtacgtcttttcagaaggaaatcgacaaagcgggaagtttgcctggaactggcggcgattgtcaatgatgtgaaaaagggaaccatcaggttcccttttgcgttagtgccggaggccgcattggcgcgtaacgtcggatgcgacgctggcgcgtctactccgacctactgcgaattaatctttcagcttgcgcattaccagcgtggcgttggtgccgccgaagccgaagctgttagacataacggtggtcagttcgcgatcggtcgtttcggtcacgatgttcagacccgcagcctgctcgtccagctcttcaatgttgatgctcggggcgataaagccgtgttccagcatcagcagagagtagatagcttcctgtacgccagcagcgcccagagagtgaccggtcatggctttggttgcagaaatcgccgggctcttatcgccgaacacttcacggatagctgccagctctttcacgtcgccaaccggagtcgaagtaccgtgggagttcaggtaatcgattggggtatcaacgccatgcatcgccatcttcatgcagcgtactgcgccttcgccagacggagcaaccatgtctgcaccatcagaggttgcgccgtagccaacgatttcagcatagatgtgagcaccacgcgccagcgcgtgttccagctcttcaaccactaccataccgccgccgccagcgataacgaaaccgtcacggtgagcgtcgtaagtacgggaggctttttccggggtgtcgttgtatttagtagacagcgcacccattgcgtcgaattcgcaagccatttcccagcacagctcttcgccgccgccagcaaacacgatgtcctgtttgcccagttggatctgctctactgcgttaccgatacagtgtgcggaagtcgcacacgcggagctgatggagtagttaacgccatgaattttaaacggggtggcgaggcaggcagaaacgccggatgccatcgctttggtgaccacatacgggccaaccgctttcaggccgcgcgggccgcgcattgcgtcagcgccgaacacctggaaacgcggggagccgccgccggaacctgcaatcaggccaacgcgcgggttattctggtaagcttccggagagaggcccgcatcagcgattgcctgctccatagaaaggaatgcataaatggatgcgtcgctcataaagcgcacaactttgcggtcaatgaggccagtggtatccagttttacgttgccccagacgtggctacgcatgccggaatccttcagctcctgagagaaagtgatccctgaacgtccttcacgcagagatgccaggacttcctgctggttattaccgatgctggaaacaatgcccaggccagtaatcactgcacgtttcattcaatacctctgtaagtcgcacatagagtaagtttcgaatgcacaatagcgtacacttgtacgccgaacaagtccgatcagccatttaatagagaaatttgcgcagccttacacacatcgctaagatcgagccaccgcctgtaagacgagtaacttacgtgaaacactactccatacaacctgccaacctcgaatttaatgctgagggtacacctgtttcccgagattttgacgatgtctatttttccaacgataacgggctggaagagacgcgttatgtttttctgggaggcaaccaattagaggtacgctttcctgagcatccacatcctctgtttgtggtagcagagagcggcttcggcaccggattaaacttcctgacgctatggcaggcatttgatcagtttcgcgaagcgcatccgcaagcgcaattacaacgcttacatttcattagttttgagaaatttcccctcacccgtgcggatttagccttagcgcatcaacactggccggaactggctccgtgggcagaacaacttcaggcgcagtggccaatgcccttgcccggttgccatcgtttattgctcgatgaaggccgcgtgacgctggatttatggtttggcgatattaacgaactgaccagccaactggacgattcgctaaatcaaaaagtagatgcctggtttctggacggctttgcgccagcgaaaaacccggatatgtggacgcaaaatctgtttaacgccatggcaaggttggcgcgtccgggcggcacgctggcgacatttacgtctgccggttttgtccgccgcggtttgcaggacgccggattcacgatgcaaaaacgtaagggctttgggcgcaaacgggaaatgctttgcggggtgatggaacagacattaccgctcccctgctccgcgccgtggtttaaccgcacgggcagcagcaaacgggaagcggcgattatcggcggtggtattgccagcgcgttgttgtcgctggcgctattacggcgcggctggcaggtaacgctttattgcgcggatgaggcccccgcactgggtgcttccggcaatcgccagggggcgctgtatccgttattaagcaaacacgatgaggcgctaaaccgctttttctctaatgcgtttacttttgctcgtcggttttacgaccaattacccgttaaatttgatcatgactggtgcggcgtcacgcagttaggctgggatgagaaaagccagcataaaatcgcacagatgttgtcaatggatttacccgcagaactggctgtagccgttgaggcaaatgcggttgaacaaattacgggcgttgcgacaaattgcagcggcattacttatccgcaaggtggttggctgtgcccagcagaactgacccgtaatgtgctggaactggcgcaacagcagggtttgcagatttattatcaatatcagttacagaatttatcccgtaaggatgactgttggttgttgaattttgcaggagatcagcaagcaacacacagcgtagtggtactggcgaacgggcatcaaatcagccgattcagccaaacgtcgactctcccggtgtattcggttgccgggcaggtcagccatattccgacaacgccggaattggcagagctgaagcaggtgctgtgctatgacggttatctcacgccacaaaatccggcgaatcaacatcattgtattggtgccagttatcatcgcggcagcgaagatacggcgtacagtgaggacgatcagcagcagaatcgccagcggttgattgattgtttcccgcaggcacagtgggcaaaagaggttgatgtcagtgataaagaggcgcgctgcggtgtgcgttgtgccacccgcgatcatctgccaatggtaggcaatgttcccgattatgaggcaacactcgtggaatatgcgtcgttggcggagcagaaagatgaggcggtaagcgcgccggtttttgacgatctctttatgtttgcggctttaggttctcgcggtttgtgttctgccccgctgtgtgccgagattctggcggcgcagatgagcgacgaaccgattccgatggatgccagtacgctggcggcgttaaacccgaatcggttatgggtgcggaaattgttgaagggtaaagcggttaaggcggggtaatctgctctcgcagtgtttgccggatgcggcgtgaacgccttatccgacctacgtgtgacgtgtaggcctgataagacgcgataagcgtcgcatcaggcatgctgctccagacgccgcaacttactgctgtgacgcctgctgaaacaggttttcccacatatcggtcaccagcgcctggtcacgcggcgacaattcaccagcaccaatggctttttccagactctggctaacggtcgtatgcaccgcctgagcggagtggtcatcaccactttccagttctgcgatggctaatgtcaggtggccacgcaaatacccactggcaaacaactcatcatcactggcatggtcaaccataccgtcgattaatgccagaatgcgtgattcaaactccgcgatcatcttctttcctcattgtaaaacgtggcgctggcttcagttgagcgcttccggccacgggaactgttccgccgtaagttccggcgtgtgataataattttgtagtgctttaatgaagcgtgccggacgttccggaatgccatttgtcagataatccatcacctgcgcatgtactcgccgttgaaacaccacacgatccggttcgaaatccccttccagattgtcgcaactgacgttaaacggatatcccgccgccacacagaacaaccagtcgagcgcctgcggcttcacttcaacatcttcaaactggctttgcgtttgggcatcgcgtccgtccgggcaataccagtagccgaaatcaaccagctcacggcgcgctttcccggcaatacaccagtgcgaaatctcatgaattgcgctggcataaaagccatgagcaaagacgattcggttatacggtacttccgcatcagcaggaagatagatcggttcgtcgtcgcctttaatcagacgggtattaaaatcatcggcaaagcagctattaaaaatttcaatcaactgctcgtagtggtgtgtactgttcattagttcatccccaaccagtggaggatctcctgtccgtggctgtcgtaaagtaatttggcactcatcaccgccgagacgataacaatcatcgggcggatcagcttttgtcctttgctcaacaccagtcgtgaacccatgcgcgcgccgaggaactgccccaccagcatgacaaagcccgtcgcccaaatcactttgccgccgagaataaacagcagtaaaccgccgatgtttgacgttgcgttgagtaatttggcgtgagccgtggctttggcgaggttaaatccgcacagcgtaacgaaggccagcgcgtaaaacgacccggcagccgggccaaagaatccatcataaaaaccgacgcagccaccggctattaacgcgaagggtaaaccgtacatccggcgctggcggtcttcttcacctagctttggcatcagcaagaaatagaggccgatacaaattaccagaatgggcaaaatctgccgtaagacatcagcctgaacgtattgcaccagcagtgcgccgctcattgagccgacaaaggtcatggcgatattgagtttctgatcgcttaaactaaccactttgcggcgaataaagtagatagtagcggaaatagagccgccgcaggcttgcagtttattggttgccagcgcattagcgggagacatccccgctgccatcaatgccggaatggtgagtaacccaccgccaccggcaatcgagtcgataaatcccgccagcatggcgacaaaaaagagaactcccagcaacagcggggaaaccataaacaggctattaaacgtttccattagatcacgtgctcatccagtagcgcctggcaggaaggcggcaacggaggcggtgtcttcttctcaggctttgttgttcccggttttggaggttcaaaccagctttgcagttctgccccgcaaccatcgcctgatggcggtaaaggttgatcttcacactccagactatcggcagggcaacgtaatcgtacatgcatatgcgcgcgatgctggaaccagggtcgcactttgcgcaaccagtcgcgatcggtgcccgcatcaaggcaaagttgttgtttaatcgccggattaacaaaaatgcgcgtgacgtctttgtcctgggcggcgagtttgatcaagctgaaaatttctggcttccacagcgtggagacaacgtgtttaccgtcgcgggaaactaagtccagtgcttgcgggcgcaagagctgcgcggaggtccagcgagttttcggcagttgcagaaagatatcgacatccagtccggtctggtggctggcatgaccgccgttgaaacgcccaccagcgggcatccccatatcgccaatcagcaccgtacccatgcccagattgctcacctggctactcagacgctggataaacatcaccagatccgggtgaccgaaatagcgacgctgatcggtacgcatgacctgataatgttcggactgtatcggcagcgtgtcagcgccgacaatacagccattagaaaaactgcctatcgattgtgcgctacccggcacaggttgggttattttttgccacggcgtcgctgccaggctggcgctactggcaagcagagccagcagcgcaatcgcggttttattcattttttaccagcgtggaatatcagtcttcacatcggcattttgcgcccgttgccgtaacaggtgatccattaaaacgatcgccagcatcgcttctgcgatcggcactgcgcggatcccgacacagggatcgtgacggcctttggtgatcatctcaacttcttcgccaaagcggttaatggtacgacccggcacggtaatgctggaggtcggtttcagcgccatatgggcaatgatttgctgcccgctgctgataccgccgagaatgccgcccgcatggttgctctggaaaccgtctttggtgatttcatcgcggttctggctgccgcgcagcgccaccacgtcaaagccgtcgccaatttccacgcctttcaccgcgttgatgctcatcagcgcatgggcgatgtcagcatccaggcggtcaaagaccggctcgccaagtccggcaggaacgccactggcaacaacggtgactttagcgccgatggagtcgccctcttttttcagcgcacgcatcaactcgtctaacgcgtcgattttgtcggggtccgggcaaaaaaacggattttgctcgacctgcgaccagtctttgatatccagcggaatgtcgcccatctgggtcaggcagccacggatttcaataccaaatttctcggcgagatattttttggcaatagctcctgccgccacgcgcatggcggtttcgcgggcggaagaacgtccaccgccgcgataatcgcgcagaccgtatttttgttcgtaggtgtaatcggcatggcctggacggaaaacgtccttaatcgcactgtaatcctgagagcgctggtcagtgttttcgatcaacaagccaatgctggtgccggtagtaacgccttcaaaaacaccggagagaattttgacctgatccggctcgcggcgctgggtggtatagcgcgatgtcccagggcgacgacggtcgaggtcatgttgcaggtccgcttccgtcagcggaatgcctggcggaacaccatcgacgatgcagccgagcgccagcccgtgcgattcgccgaaggtggttacgcgaaagagttgtccaattgtgtttccagccatcacggctccgttattgttgtgtttgcgtgtttacttaatctttataaatcgcgaaatgttctcgtgcggcaataagctgctctttggtgagcataaacacaccatcgccgccgttatcaaactccagccaggtgaacggaacatccggatattgttccataagatgtaccatgctgttgccgacttcacaaatcaacacgccatcatcagcaaggtaatctgccgcgttaccgagaatgcgacgcgtcagtttcaggccgtcagtgccagatgccaggcccagttccggctcgtggcggtattcgtttggcaggtcggacatatcttccgcatcgacatacggcgggttagtgacaatcaggtcgtactgcactttcggcaagtcgcggaacagatcggaacgaatcggaatgacgttgtggatcagaccgtgttcttcgatgttctgttcagcaaccgccagcgcgtctggagagatatccaccgcgtcgacttctgcatccgggaaggcataagcacaggcaatggcgatgcagccgctaccagtacacatatctaaaatatgctgcggttgcttgctgataagtccggcaaatttattgttgatcagttcaccaatcggcgagcgcggcaccagcacgcgttcatcgacgtaaaattcatggccgcagaaccacgctttgttggtcaggtaagccaccggaatgcgttcattgacgcggcggatcacgcgttcaacaatacggtgtttttcgctggaggtcagacgcgcggtgcgcatatcttccggaatatccagcggcaggtagagcgaaggcaacaccagctgtacggcttcatcccacgggttatcggtaccgtgaccgtaccagatatttgccgcgctgaagcggctcaccgaccagcgcaacatgtcctgaatggtttgcagctcatttactgcttcatcaacgaaaattttatccacgtattcctccagggcatgatcgcaataatttcggcggctagtttgccatgaagatgacgataaatcagcattcacgcgcggtgagtgaggaaaaatacgtttaaaacgatcgattgcgctacgagtcgggtaaactgtaggaaaattagaaatagagacagataaatgaaaaagaaaacaacacttagcgaggaggaccaggctctgtttcgccagttgatggcggggactcgcaagattaagcaggacacgattgtccaccgaccgcagcgtaaaaaaatcagcgaagtgccggtgaaacgcttgatccaggagcaggctgatgccagccattatttctccgatgagtttcagccgttattaaataccgaaggtccggtgaaatatgttcgcccggatgtcagccattttgaggcgaagaaactgcgccgtggcgattattcgccggagttgtttttggatttacacggtctgacgcagctgcaggccaagcaggaactgggggcgttgattgccgcctgccgccgtgaacatgtgttttgcgcctgcgtgatgcatgggcacgggaagcatattttgaagcaacaaacaccgctgtggctggcacaacatccgcatgtgatggcctttcatcaggcaccaaaagagtatggcggtgatgcggcgttgttggtgttgattgaagtcgaagagtggctgccgccggagttgccctgaggagttgagcgcgttgcgccaggtacgggtaatggcaggggcgaatgcccctgcctggtgtatctaagggctacaactcattcagtatgtactggaaccggcaagtagaatcgattggctgcatactgctggtatcaacacgcacgaccatatcgtgtaactgtttgtccgttatagggtgtcgatttggcgtgaccgagacttccgccttgtcacatcccgacgcggtaaaagttatcatctgtgcaacccagcggcagtaaccacctgtttcattcatctgcgtactgtcgcacaacttcccatctttcatcaaatacgttgaaagcgttttctcaaccacaccgcccgtcgactgcagggtgagcagttttgacttactgacataattctcattccatgaaacgtcataaggttgaacagaaacggatggacaaatcgtgtcgtgactatcaggcccctgatacgtcacgccccctggagaggcttcagagtcattcataataaccaaccatggacaagaaaagtaagattcaatctctgcagagacaataacctcaaatgtataatacccgcagttccacccagacggtaatccaggacaacttgctttgttgatattttgatggtagccaatcagcttaaccgaaggggcaggaggaggaccactccagctcacattttgcaatatttccccagtcatgagccattgactacttttatattcaccaacgtacactgcggatggcatcattatttttaaattaaaagtcgcaatattacgcgaatcaccgttgtaaccgtagtaaacgtcaacgctatgcccggcagccatagcttctgtagtagcaataagcatgaccagagcgaacaaccatcgtagtattttcattttaaatatactcaaatgtcgcagttaaagaggcggtaaattcaccgatcgtcacatcacggccgcttttcgcctgtagccaggctctgaaattgatatcgttattgccattggttagcgcaaaggtcgccccatttgtattgttgatggcaacctgcattccgtcggttttttccatgccaattcccactccctgagcggttgatgacgtatccagtgccagaaaaccgggttgttcgctgtcttctacccccgtgagcgtgacttttacgttgtatcccgccggccctttgcaatctttcagcttaaagactacgggtacacgagcggactggcctgcaacgttcaaatcctgacgactgaccgtgggaaagcgcacctctgccagatattggccatccaccaccagcgcacaggatttacttaataaattaccggagaaatgcagattattatctgccgcgaataacgtgctactcattgccaatatcagccccgctaacaggacgtaaccaccggactgaatcattgatttattcattgataatccacccgtaatgttgcgtaagccgaaaaattcgtatcgcttaacacagcatcactcgcttttaccggtacggcctccagcttcggcttttgcgtaaaatcagtggcgttgatagcaagcggagtattgagtttaaaacgctgaccatcgtgctgaagctcgataccaaaaccgggtacatcagtttcaattgctgcatcattaaaactggtttgtgtaccagtccaggtgagggtcatctcccaatctggatgacgggtcgtcgagtcacaagtgagttcatatggcacctctttacgaccatagttgccgttgatgtcgtcgataatgagatcgcgaaattcgacttcaatggttttaccaccgctgatgctacaggttggcggtgacaataatgtcccgtgaaaggtgatgtcttcatcagcagcatgagctatggcgctactgacacaaagcagggttaagaaagtctttctcattgatagtccaccaccatggtcaaactggcgttaaactcgcccgcagcaagttgcgccccgcttgccttcacaggtacagccttcaactgtggctggttattgatattaaatggcgtccagctattttcaccgacggcaaacaatgagttatcggcgctattttctatccgaatgcccagcccggtgatattggtactgagtaccgtttcgccgttaatcgttgaggtattgcccttaagttgcatccgcaagtcgttagcaagactgtttgtgcagttcaacgtgtatttcgcatcttgccgataattggtgccatcaacgttatcagcaatcatattgccgaactctacctggctgcccttgattgaacagggtggcggagcatcgaccaacacgcgcagaattaaatccacgggtttactaccagccatagcagataaactacagacactgcataccagcagccctgcgcccactacaaacttttgactcataactccccccgtcatcagcctttgcggctctgctcttcatccacctggcagctgttgccattgcactggaagaacagcggcatccgtgcgccaaagtcgttgacgtaagtcagcaccggtacgctatccattttcacattcagcggtaccgtggttttcggctcaatgaccagaggcgagaaccctgcagctggattaccgtttttctgcgcactggcgttgctgataatcacgtagtacggcgttgggttattgacggtaaatgcctgaccgctgcgggtgagcgtcaccttgtgctgccacggacttttcatactgaccttttccagcgcctttggtcgccagaacaacttgatacgcgtttgcagcgcgatttgcagggtattgggtttgtttgattttggcgggatctcgcgcacgttaaagtagaacatgctttcacgatcggctggcaatttgttgatatccggcattccctgcacttttacctgcccgttcatcattgaatcgatgcgttgcactggcggcagcacagttaacggcgaggtgatcttgttacccttttcatcttcaatccagctttgagccagataagggagtttcggatcgttattacgcagcgtcacgctgattgatttgtcgctttcattaaatatcaaacgggtacgatctggcgttacagacgccagggcagacaaactggtagcgctaagcagtaacgccagcgtcatagcacccaatttggcagagcaaagtaaatcagacatggatcattccttaatcacgttattggttagctgaaacagaaacagggggatcggtgggtgtcacctgttgcgtctgctcctgaatgacaggctttatgtcatcaggaacaaccggcgcgacgttgcctttatgctggcatggcagtaacaagccgttaaacagatcggcaggcagcgggtccggcaggttgatatcgcaatgcgcaacaccactccagaacacactcatatgttcgccaggtttcaccccagccagatagacactaccgtcatcatcgacaaggcccactgtctgctcgttatcattttttacttctgcgccaaacggtggatggctgccatcttgtaaacgcagcaccgccatcgctttttgaccactgatgacggcaaatttgcggtagccaatggctccttcagttagcgtggcttgcaccaccgactgggttgcttcggcgttttccggcaatttgttgaggtcgatatacgcctgattgcgataataattgttaacgtcagaaacgacggctttaccaaacatattggtataaacagcagccccgttaccttccaccggaacatcggcaacgccatcggcatcaatcagcaggcgtgtcccgcccatattctgggtacggtgaagtgcgccgccgtgggtagtaagcgttgcgccgccctgtaacgacaagcccgcagaggtgtattgcccttcatggtagttcgcactgaggtcaacctgcgccagcgaaccatcatggctgtagtagccatcaacgctggtgtgtttgtcactggtgccgatgttcaactgatagtgagtcgcgtcatcgacacggctaaaataaccgacctggctgctgtccgtcccactgccatagttgccgttatagctaacggtactgttgtcgccccacggcatactgagcgaaatctacatgcccttatccgcccggttgtcatactcgtagcggtagccagtcagggaaacgctcatattacgaatgctgcccatattgaaatagtgggagagcatgatgttgtagtttgtctgctcctcacgatcccagtaggtatggcgggtatagttgagataaaccgaaacacccgcatcgcggaagttctggttataagtggcggtgtacatctctttgtcgttgcccgtacggaccatttcgctgtcactggcatccagatactcgctcatggtcataaagttctcttccgagaagcgatatccagcgaaagtgacgcggctgttgagctggtcaaagtctttggaataactcacacggaaggagttaccgtccagcgaacctttgccataagcggtgtctttatccagtttggtatgcgaatgagtaacatcaaacgcgaccgcgccgaaggtagacaaatcgcgaccgacgcccagcgccgcagactgatagttttcatcacccagcgcaccgccatataacgaccagccgttagcgatgccccaggaggcttcagcaccagagaaaaatcccccctcgacatggtggccccactcttgcggacgtcccatcatgatcttatagcgaacctggcctgggcgagtgaggtatggcatcgaggcggtgctgatgtcatattcctgcacctggccgttctgttcttcaatgcgaatatgcaacgtaccggagacggaatcaccaagatcctgaatacgaaacggtccagccggaacctgcgtttcgtaaatcacacgccccatctggctgacggtcacttttgctgtggtgtgtgccacgccggaaatgtctggcgcgtagccgcgcagattgggaggcaacatttgatcgtcagtgctgacactgccaccaacataattaaaaccgtcgaaaatatcggaattgaggtaatcttcgcccagcgccagtttggcttttaatgacggtaacgcccgccaggcataatagcgactccactcccattttttttgtgtgtcatcgccgccaaattcatcgtcatcatcattactgcgcgtatgttgatagttggtctgccagtcagcgcgcatacgccatggccccaggttaaccccgaccgtcccgttgccgctgatctcgttactgtcatcgccgccattttcttcgtgtcgtgtttgcgcagtgatgctgtagtccgcaatgatcccggagatgccatcatcccaacgagaaggtggatcccagtcgggccaggtatattcgaggtaagcctgcggtagtgaaatgactaatgcggactggcttaaatcagccttaatttccacgccttccagttgaccgggcttcaggcatttaccatcgtggctccattgcagatttttcgccacgtcttcttttaaaccaaactgcgccaccagttccggtgtcagacaagcatagcttttgctaacgtcatcttcaccagcataccagtaaatatcgtactcttccgccaatggctgtttatttagttgaacctgtaaattgtattttccgggctcaacatacccctggctggaaaaacgcttcagatcaatttttgtgtcgccttttaattccagaaaacgggaatcaaactgaatgtcgtcttcagcccagacactgctataactccctgacattgccagcgcaatgcaccacggaagaatccgtaatcgaaaaagagaatggtcaggcatacacgtttttatccgtttttattcttgttcggtcaaaatccatttaaataccccatagcagtgtcgctatgggggtatgccttacaggtaagtaatctggaaggtggtatttgcttcgaaattacccagatctggcgcatcagctgcgccgaccagccaggctttaaagttcagagtctgcttcgctttgcctttattagtggcagtatctttcacgattttctggtcaatacccatgccgcttttgtaagaggtacccagagagtcaccgatcgccaggctaacattgttaaatgccgcaccggtatcggtattgaaaatggtgtaataattgccgctatttgcagaagaaacggtaccagtaaaggtagtggtcattgtttcctgagtatcaaatacgcaatcttgcaggcgaatctggaaatttttcggcgtggtggtgccgttatttttcagtttttcggcaccgatatcacccatatcaacttccagtttgtgatcgtccggaacgatagaacacactgagtcttcaatggtgccgtaaaaacgtgcagtaccgttgttacccgcagcgattgttgccgtagaggtgaacgcgcccatcaccattgccgcagcaatagctgttttaacaaacttactcattatttgtccttaaactataaataattaaaatataaacattgcaatacattgattcagtcaatagccaatgtttatacccagccattgaatacggcatgcgatccaaaaaaacaggtcgtaaaaaatgtattcgttggtgtggggtcgaatagtgatgttttcactcccctgattcaatttaattttactaatgagtaaatgtagatttaattaatatattgataggggaaagattatcttaaggatcttctaaaaaaacacgaaatatatatttagaaaaaacaggaagcatatcaacaatgaatgccaatagcttaaaaaacaaacaatgaacatataatgcgattggcattaacccgcttttgtcgatataatatataaacactatagccagaatttaatcaagtttcaattacgtcctgcctgattattcaactctattttctccattatctgtattaataaatgataatgagtgtcaaacagacattattcatttcaacatgtaactttgggcaaaatcaagatacgcgcagaagaatactttccgaatgaaagttaaaggtgttttatttatagatggggagagtcttcgatagtagtgaggttgacagatatccgctgcctgatgagcaattatgcccaatgaatctacctcattgggcataatttggaactcatcagatagcttttgccatcttcagattacacgggctcatctgccagttgaatgtgccgtttccgctttcatcaagcgttacgctggcaatggccgaggtggtaaacataggcggcgtttcgcccggacataactcggcaaccagatacccgactaacggtaagtgagagatcaccagtaccgaagcaacaccttcattggtcaacgcctgcaaataggcactgaccagaccaacatcgccgcagggcgttaactccggcagaacttctgcactggaaggcaggttcagacaatcccctacttcttccagtgtttgctcggctcgcaggaacgggctcaccagaacgcgttcgatttccactttttgacctttcagccagttcgccatcaggcgagattcgtcacaaccattagtggtcagaggacgaacggaatcactggcggcatcgagggctgcgtcgccgtgacgcatgataaaaacttgcatattgcaccgcttttgttaaccagattcgcccgttttctttcatctgaaaccagagaaagaaaacggtggccggcattgtgccttatccattcaccgaatgaaacgctgttttttacctcaatggcgtaagtatagtcaatatgcgtttacattttgaccaacactccgccattcagcgcggattcatatagctttgaccttcttattgcaggtcagttgcagttgttttccaaaaactttccccacgcgcgcccatctcgaccaaacgctcgcaaggggtaaaacgggaaccatactgcgtggcaagtcgttgcattattgcaaccacttcgcccgcgccgagagaatcgatatagcggaacggtccaccgagaaatggcggaaaaccaatgccaaataccgcgccaatatccccgtcacgcacgctacggataacctgctcatcaacacaacgtactgcttcattcagcatcaacatcacacaccgttcagcaacctgcggtgcggagattcgcccctgcccttgtgtgccaatcagcgggtaaatggcgggatcgacctgttttttgcttttacgccctttctgaccataaagatagaaaccccggccattttttctgcctttgcgatcgtcgttcaaaattgaagaaacaacatttgcaggcgcgctaaaacgttctccataagcggcttccagtacaggaataattttagtcccggtgtcgattcctacctcatccaaaagttggattgggcctaccggaaaaccaaatttcactagcgcggcatcaatgtgctctacccgttcaccttgggtcaacatgcggatagcttcattaatgtaaggcgctaagatgcgattgacgtaaaaaccggctttgtcacgcacgacaattggcgttttaccctgttttttcgccagttttactgtggtagcgatggtttgcgccgatgtccccgcatgaggaataatctccaccagcggcattttttccaccggactgaagaaatgcaggccgataacttgctcaggtcgcgtggcgtgagcggcgatatcaccaatcggtaaagatgacgtattcgaagcaaagatggtatgagcggcgcaattttgctcaacttccgccaccatctgttgtttcaattcgagattttcaaacaccgcttcaataatcagatcgcgatgggcaaagccgcgatagtccgtcgttccggagattaatgccagctgtttgtcacgttcgctggctttgagatgacgacggcgaactttgccctccagctgatcccaactgtacttcagcgcatgatttatgccctgcgggttgatatctttaattctgaccggaatccccgctttacaagcagtgacataagcaataccgccgcccatcaagccaccacctaaaatccccacgctgtttaatggcgcaggcggcgcatcactgccgggatctttcttcacgtccgtactggcaaaaaagatactacgcagcgcctgcgattgtggcgtcatcgccagttcgccaaacgcccgagcttcggcgtcataaccgctgctggtgccctgcgctaatcccgtttcaacaacctccaggatgcgttctgtcgccggataattgccttgagttttgtgttctgttttcttgccgaccattttgaacagcagcgcacgacctaacggccccgccagaatacgctcgcgtacaggtagagggcgggaagatgggcgctccttctttgccagctcaacagcggcttccagcagaatggagtgcggaacaacgtcatccaccagccccagctttaatgcctgtttcgcccgaagttgttttccggtgaggatcatctctaatgctgtgctgacgcctatcagacgcggtaaacgctgggtgccgcctgaaccgggtaacaatccaagttgtacttcaggcaaaccgagcaccgttttaggatcgtcagtacaaacgcgaccgtggcacgccagcgccaactccagcccaccacccaggcaagcgccatgaatagccgcgataacctgaatgggcaaagcatgaatctccgccatcaactgttggccctgccgcgccagagcttccgcttcttgcgccgttttgcagttgccgatcatgttgatgtctgcgccagcaatgaagttgtccggtttagcggagacaaacaccacgcctcgcaactctttgttttcacggagttgcttaataatggcgcgcacctgcgaggcaaactccgccttcagggtattcattttctcacccggtacgtcgatggtgataacggcaatgttgtccagacgaacattaagggtaaacgctgatgtcatttccattattccgcctccagaaccattgccgcgccaagcccaccggcagcacaggcggtaactaaaccaaatccaccgccgcgacggcgaagttcatgcaatgtctgggtaatcatccgcgcgccggtcgccgcgaagggatgcccgtaagcaatcgaaccgccaagcacgttaaatttgctatcgtccacttcgccagtggcatgtgcacgccccagtgcttcacgagcaaaacgttcactacccagcaactgaatattcgccagcgtctgagctgcaaaggcttcgtgcatatcgatcaatgtcagatcgctcatcgtcaaaccggcacgctccagcgccagcggtgttgaccaggctggaccgagcaacatgtcctgccagacatcaatcgcagtaaatgcgtagctgcgcagataccccagcggcaccagccctaattctttcgcccgggattcagtcatcaggatcaccgctgccgcgccatcggtcagcggcgtactgtttgccgccgttaccgttccgtgtttgcgatcaaacgccgggcgcagctttgcgtaatcggcaagcgaggaattaccgcgaatattgttgtcttcgacaagcggttgtttataaggagggataaaggcagtcatcacctcttctttgagttttccgtctgaccatgcctgagcggcacgctgatgcgaacggtgcgctaatgcatcttgctgttctcgggtgatgccgtaggttttcgccatttgctctgcggtgtcgcccatccgcaagccggtagaatattctgctaccgcaggtggtacgggcattaagtcgcgcaaacgcaggcgagagaagagtttcagtcgctggctcatggtacgagctttgttgacatcaaccagcacgcgcgccagttttttactgacgccaattggcaataccgaagaggaatctgccccaccggcaatccccgctcgaatagttcccgccatcaggctttctgcgacgtttgcaactgcctggaaactggtagcgcaagcgcggctgacgctgtaagcatcggtatgtacattcattcccgtaccgagaacaatttcacgcgcaatgttgggggcttcaggcatttgtacgacctgaccaaagaccagttgttcaatcacttcggcggggatctcgctgcgtgccagcagttcgcctaccaccatcttccctaaatcaaccgcgggaatgccatgaaaagccgtcgcctgacgggcaaaaggcgtacgtaaaccgctaacaatggcgatacgatcgccctggcgggtaaccagcggtaaaacctgacccataacactcccctgtaaaaaaataaataaagtggtctgacctgatcatagtcttaaccatttttttacatttagccaagtggagaaaagggaaagtgggagctatgacacagagagaaaagaagaagagaaaagaaaacgcccctgccagcaactgacaggggcgtacgtacccgagaggaattaacgcagacccagctggaaaatcagcatttcagcttcgcaggcaaaagtgaaatcgatatccaggcgcacaccgtcagactcttcagtgaaagtcggggtgattttgcaaggttcagattccacgctacgggctttttcagtcagcgccgccagcgtttgctctgcttctgcgcggtttgcaaacacgcggctgtaagacgcggtgcagtcggagttgtccataatggtgccaacatccatacagcagcaaaccggggtttcatcagcactacatttactcatcgttgatttcctctgtatgtgcacccaaggtgccagataaacgttgtggatattttacgcttccggaaagtgctgctccagttgttaattctgcaaaatcggataagtgaccgaaatcacacttaaaaatgatctaaaacaaaattcacccgaatccatgagtgcgccacctccaaattttgccagctggatcgcgtttcttagatcatatttgaaaaaagatagaaacatacttgcaacattccagctggtccgacctatactctcgccactggtctgatttctaagatgtacctcagaccctacacttcgcgctcctgttacagcacgtaacatagtttgtataaaaataaatcattgaggttatggtcatgagccagaaaaccctgtttacaaagtctgctctcgcagtcgcagtggcacttatctccacccaggcctggtcggcaggctttcagttaaacgaattttcttcctctggcctgggccgggcttattcaggggaaggcgcaattgccgatgatgcaggtaacgtcagccgtaaccccgcattgattactatgtttgaccgcccgacattttctgcgggtgcggtttatattgacccggatgtaaatatcagcggaacgtctccatctggtcgtagcctgaaagccgataacatcgcgcctacggcatgggttccgaacatgcactttgttgcaccgattaacgaccaatttggttggggcgcttctattacctctaactatggtctggctacagagtttaacgatacttatgcaggcggctctgtcgggggtacaaccgaccttgaaaccatgaacctgaacttaagcggtgcgtatcgcttaaataatgcatggagctttggtcttggtttcaacgccgtctacgctcgcgcgaaaattgaacgtttcgcaggcgatctggggcagttggttgctggccaaattatgcaatctcctgctggccaaactcagcaagggcaagcattggcagctaccgccaacggtattgacagtaataccaaaatcgctcatctgaacggtaaccagtggggctttggctggaacgccggaatcctgtatgaactggataaaaataaccgctatgcactgacctaccgttctgaagtgaaaattgacttcaaaggtaactacagcagcgatcttaatcgtgcgtttaataactacggtttgccaattcctaccgcgacaggtggcgcaacgcaatcgggttatctgacgctgaacctgcctgaaatgtgggaagtgtcaggttataaccgtgttgatccacagtgggcgattcactatagcctggcttacaccagctggagtcagttccagcagctgaaagcgacctcaaccagtggcgacacgctgttccagaaacatgaaggctttaaagatgcttaccgcatcgcgttgggtaccacttattactacgatgataactggaccttccgtaccggtatcgcctttgatgacagcccagttcctgcacagaatcgttctatctccattccggaccaggaccgtttctggctgagtgcaggtacgacttacgcatttaataaagatgcttcagtcgacgttggtgtttcttatatgcacggtcagagcgtgaaaattaacgaaggcccataccagttcgagtctgaaggtaaagcctggctgttcggtactaactttaactacgcgttctgataacgcgttcgcctggataaagtcacctgcatagcaggtgactttaactcccccacttcaccgaaagtagtgtcctcattgcttacctcctgagttttgcaaacagcctgttggcagcttgccctttcaaatcaataagcggtatccacagacaaacctgaagggaaaggcatattttcaggcgttctgctcgtccttctcaaagagtttacttttctgcatttccaggatactccccccccctggctattgtgcgctcatacactcaaattaaagataggttctaaataaatgagcgttttttgatagtctatttcattaggtaatatatatttgtaacaaatcaatcaaaatggaataaaatcatgctaccatctatttcaatcaacaataccagcgcagcttacccagaatccatcaatgaaaataacaatgatgaagttaatggattagtacaagagttcaaaaacctttttaatggtaaggaaggaataagcacctgtattaaacatctacttgagcttataaaaaacgccatacgagtaaacgacgatccttatagatttaatattaataattcctcagttacttatattgatattgactccaatgatacagaccatattactattggtatcgacaaccaagaaccaatagaattacctgcgaactataaagacaaagaactcgtccgtactatcattaatgacaacatagttgagaagactcatgatatcaataacaaggaaatgatcttcagcgcattaaaagaaatatatgatggagatcctggttttatcttcgataagatatcacacaaactcagacatacggtaacggaatttgatgagagcgggaaaagcgaaccaacggacttatttacctggtacggtaaagataaaaaaggcgactctctcgctattgtaattaaaaataaaaacggaaatgattacttatctctcggttactacgatcaggacgactaccacattcaaagaggaattcgtattaatggtgatagtctcacccaatattgtagtgaaaacgccaggagtgcttcagcgtggtttgaaagcagtaaagctatcatggcagaatcatttgcaactggttccgatcatcaggttgtaaacgagctcaacggggaaagactgagagaaccaaacgacgtttttaaacgttatggtcgagcaataagatatgattttcaagtggacgatgcaaaatataaatgcgaccatctaaaagaaatagtttctactttagtcggtaacaaaattaacgttggccattctcaaaaaatatataagcattttaaggatctcgaaggtaaaattgaagaaaggcttcaaaatcgccaggctgaatatcaaaatgaaattaatcaaccatctgcgccaggtgttaattttgatgatatttaaaattatttttccagttttttgatttttcaacagctgaatatcggaaatagtcagtgacgaacatcagtatttttacataattacgtctaggtcattgtcggtttatctccttttacttgtggtaattgagggataacaacaaaaaaggtgagttttgcgactcaccttttttatttgtttcttattcagaatcaatatcttttaaatcatcctgaatcgcttgtgcgttcggattttcctgcggtttgagttcgccgccattagcgatgaaatcatgacgctggaagtacgcttcgcgcaccataatataaggatcggacgactgacgcagcagaccatcggaatccagcagctgagcgcgggtttcgatcccttcaagcgtccatttacccacagacatcggccaggtcagccaggaaagaaccgggtaaaaaccatccgccatatcaccaccgtcatcacgcagcgtgaagctaccgtagaacggtaactgaacgtaaggcccataacccacgccataatgaccaagcgtactaccgaagcggtgaggttcagtccgttgcagtttcgggttcgccatccctgcaacatcaataaaaccgcccatccccaaaatggtgttcaggaaaaagcgggtaaagtggaccatcccctgataagggtcgccctgcaagaagtagttaaccatcaccgcaggttcttcaaggttgccagtaaagttgctcaaaccgttacgcgccggttgcggaacataatcacgccaggcgacagcgaccggtcgaacaatatacgggtctaatacattgaagttgaagttgtacatggtgcggttgaacccttctaacgggtcagaacgcccttgctgatctgtaccggaactcgcacaccccaccagaagcgtagttcccagagcaagcgccgacaggcgaagcttcataaatgtctccctgtttttttatggcttatgcagtttgccatccatgacggaacgataccgtatccgcctgtttaggtgtgggcgattgtaacagcacgtcaactgatgtccagacgccctgatttgctgatttgatcatagcctggtaatcgccgccctgtaggctacttgattctatagaaacagaaaaaggcaaacgcagccttttctacattttcagagtaactcccgtcagttgcgagcaaaaaagccgctacgctttagctatacgtgctaattcaagagaagagaccatggacaacgacaaaattgatcaacacagcgacgaaattgaagttgagagcgaagaaaaagagcgcggcaaaaaaatagaaatagatgaagaccgactcccctcccgggcgatggcaattcatgagcatatccgccaggatggtgaaaaagagctggaacgcgacgcaatggcgctactgtggtcagccattgcggcgggtctgtcgatgggcgcttcgttactggcaaaagggatatttcaagtcgaactggaaggtgtgccgggcagcttcttgctggagaatctcggttatacctttggttttattatcgtcattatggcccgccagcaattatttaccgaaaataccgtgactgcggtactacccgtcatgcaaaaaccgacaatgagcaacgtcggcttacttatacggttatggggcgtcgtgctgctgggtaatattctcgggacaggtattgcggcgtgggcatttgaatatatgcctatcttcaatgaagaaactcgcgatgcatttgtcaaaatcggcatggatgtgatgaagaacacccccagcgagatgtttgccaacgcgatcatttccggctggctgatcgccactatggtttggatgtttcctgcagcgggtgcggcaaagattgtggtgattatattgatgacctggcttattgccctgggtgacaccacccatatcgtggtcggttctgttgaaatcctctatctggtgtttaacggtacgctgcactggagcgatttcatctggcccttcgcactacctactttagcggggaacatctgcggcggcacctttatcttcgcgttaatgagtcatgcacagattcgtaacgacatgagcaataagcgtaaagcagaagcacgccaaaaagcagaacgtgcggaaaacattaagaaaaattataaaaacccggcataaatggcgagggtttaagcaatcgagcggcagcgtacttaccccgcactccattagcgggtatactcatgccgcattgtcctcttagttaaatggatataacgagcccctcctaagggctaattgcaggttcgattcctgcaggggacaccatttatcagttcgctcccatccgtaccagtccgcaaaatcccctgaatatcaagcattccgtagatttacagttcgtcatggttcgcttcagatcgttgacagccgcactccatgacgggtaaaaagtggataaaataattttacccaccggatttttacccatgctcaccgttaagcagattgaagcagcaaagccgaaagaaaaaccataccgccttctcgatggtaatggcctgtacctttatgtccctgtgtcagggaaaaaggtatggcagcttcgctacaagattgacggtaaggagaaaatcctgaccgtcggaaaatatccgcttatgactttgcaggaggcaagggataaagcatggactgcgaggaaagacatctcggttggcatcgatcctgtaaaggcgaaaaaggcttcgtctaacaacaattcctttagtgcgatttacaaggaatggtacgagcacaagaagcaagtatggtcagtagggtatgcaactgaacttgccaaaatgtttgacgacgacattttacctatcattggcggccttgaaattcaggatattgagccgatgcaactgctggaagtaatccgcaggtttgaagatcgcggtgcaatggaacgagccaacaaagcacgcagaagatgcggcgaggttttccgttacgctattgtcaccggaagggctaaatataacccggcacctgaccttgctgacgccatgaagggataccgcaagaagaacttcccgtttcttcctgcagaccagatcccggcattcaacaaagcactggcaacattttcaggaagtatcgtatcgctcattgcgaccaaagttttacgctacacagccctaagaacgaaagagcttcgttccatgctatggaagaacgtcgattttgaaaataggattatcaccatcgacgccagtgtgatgaaaggacgcaaaattcatgtggttcctatgtcagaccaggtagttgaacttctcactacgctaagctccatcaccaaaccagtctcagagtttgtttttgccgggcgcaacgataagaagaagccaatctgcgagaacgcggtactgcttgtgatcaaacaaatcggctatgagggtctggaaagcggtcacggattcaggcatgaattcagcacgattatgaacgagcacgaatggcctgctgacgctattgaagtgcaactggcacatgcaaacggcggatctgtgcgtgggatttacaaccatgctcagtatctcgataaacgcagagaaatgatgcaatggtgggcggactggcttgatgagaaggtggagtgagcgaccttaacaactatcgaatagcacaaagtcttgcaatccagtgcaaagctttgtgtgtataagttttgtctcatcaaccacagcaagtatcgatcgattaagacttggatgatagacttcattcctttgattattagctgatagaagaaatgttaaagctatttgcaaagtacacctctattggtgtgctgaacacccttatacactgggtggtttttggtgtttgtatctatgtcgcgcatacaaaccaagctcttgcaaacttcgcaggtttcgttgtggctgtgagctttagcttcttcgcgaatgcaaaattcacattcaaggcatcgactacaacgatgcgctacatgctatatgttgggttcatggggacactgagtgctactgttggatgggctgctgatagatgcgcacttcccccgatgataactcttgtcaccttctccgccatcagcctggtgtgcggtttcgtctattcaaagttcattgtctttagggatgcgaaatgaagatatctcttgtagttcctgtcttcaatgaagaagaagcgataccaattttttataaaacggtacgtgaattcgaagaattgaagtcatatgaagtggaaatcgttttcataaatgacggcagcaaagacgctacggagtcaatcattaatgctctggctgtttcagatcctctagttgttccgctgtcatttacacgcaactttggtaaagaaccagcattgtttgcagggttagaccatgcaaccggggatgcgataatcccaattgatgttgacctgcaagacccgattgaggttattcctcatcttattgaaaaatggcaagcaggtgctgatatggttcttgctaaaagatctgaccgctcaactgatggacgcctgaagcgaaaaacggctgagtggttctataagctccacaataaaataagcaatcctaaaattgaagagaatgttggtgatttcaggctgatgagccgtgatgttgtcgaaaatattaaacttatgccagaacgaaaccttttcatgaaaggtattctgagctgggtaggaggaaagacagatattgttgaatacgtgcgagcggaaagaattgctggagatacaaaatttaatggatggaaactttggaatttagcacttgagggtattacaagcttttccacattccctcttcgcatctggacatacatagggttagtggtagccagtgtagcatttatttatggggcgtggatgattttagatactatcatatttggaaatgctgttaggggatatccttcactacttgtttcaatactgtttttaggtggaattcagatgattggaataggagtattaggtgaatatattggacgcacatacattgaaaccaaaaaacgcccgaaatacatcatcaagagagtcaaaaaatgaataaagcaataaaagtatcattgtatatatcttttgttttgattatttgcgccttatctaaaaacataatgatgttaaatacatctgatttcggaagagccattaagccattaattgaagacataccagcatttacatatgacttacctttattgtataaattgaaaggtcatattgattcaattgatagctatgagtatataagttcatatagttatattttgtatacatacgtcctgtttattagcatttttactgaatatcttgatgctagggtgttatcgttatttctaaaagtaatatatatttattcattatatgcgatatttacttcatatataaaaacagaaaggtatgtaactttatttacattctttattttagcttttcttatgtgttcttcatcaacactgtcaatgtttgcatcattctatcaagagcaaatagttataattttccttccatttttggtgtattcattaacatgcaaaaacaataaatctatgcttttgctatttttttcgttgctaataatatctactgctaaaaatcaatttatattaaccccactaatagtgtattcatattatattttttttgatagacacaaactaattattaaatctgtaatatgcgtggtgtgcttgcttgcgtcaatatttgcaatatcttattcaaaaggtgttgttgaattaaataagtaccatgcaacatacttcggtagttatctttatatgaaaaacaacgggtataaaatgccatcgtatgttgatgataagtgtgttgggttagatgcctggggtaataaattcgacatatcatttggcgcaaccccaacagaagttggaacggaatgtttcgaatctcataaagatgaaacgttttcgaatgcactctttttattggttagcaaaccaagcaccatcttcaaacttccatttgatgatggtgtgatgtctcagtataaagaaaattatttccatgtatataaaaaactacacgtaatatatggagaatcaaacatactaacgactattactaacataaaagacaatatatttaaaaacattagatttatatcattgttattattttttattgcttctatttttattagaaataataaaataaaggcatctttatttgtagtatctctttttggaatatctcaattttatgtgtcatttttcggggaaggatatagagatttaagcaagcatttatttggaatgtatttttcgttcgacctttgcttatacataacagtcgtttttttaatttataaaataattcaaagaaatcaagacaatagcgatgtaaagcactaagtttaaattgcgcgccaatcatggcgcgcacaagctataataccaacctaatttctcctcctcttagagtgactatatctcctgatagaattgcggtattgactatcaaatgccctgattcgttgtttattgtaatatctcctctatctgcagacgataacttaaatgcatcattgcccacaacaaaccccctccagaaccaagtgctgatattatcatcaacagtgatagatacatatactaactgattatcgttataagtgattcctgtcttatacttaacataaggacttccactttgattctcgatagacacataacatccaggggttatgtttgtatgcgtcccgcgactatcgccccattaacgccatacgataaatgggatggtgagaaatgggtgacggataccgaggcacagcatagcgtcgcagtagatgcagcagaagcacagcgccagtcgctgattgatactgcaatggcttccattagtctgattcaactgaaattacaggctgggcggaagctgatgcaggcagagacctcccgacttaacactgtgctggattacattgacgcggtgacggcaacagataccagcaccgcgccggatgtcatctggcctgaactgccggaggagtaggccattcaatatctggcgcactggaagtatcgaccagctccagtgcgtccagataatccagccacaaattatattgcgccagttcctcacctttcagacgaccaatagccgctttaccagcccattgtttactgttcatataatcgttggcctgattaatcaattgctgctttttcagttcggctgcagcaatctgttcctcatgtgttggtggtggaatttcagaccatgcaggaaaaccattttctccagcgatacggatttttcctttcggcggtaatccggaaaactcaatatacacttgctcatcaacttcaacagcatcatctggccatgagccagcttgcgtgtaatcctctttcatctccaagggatagaaagagtttgtagtcgcggaatatatgtaattcatttttcactccataaagttaaaagaaattaacaccctaatgcgaaaaatgaagcaccgataccgggtacgcctgctctggaaataaatttcaccgggtcctggttataaccggcacaagctatatagccaacatttgcactgccgggagtgtaatcctgagtcgcaaatacccgcagacatctattcggaaatgcaatcggaaaataggttactgtgtcctgagacgtcagcggaacatcaattggcccccattgaataattaaaccggatggcaatttttgatatccaggaactgaagcagaaagcataaaactacccatatcaggtatctgattcgcccctgtccctacatttcttttagccgcttctcccaaaccaaggttttcgagagccttttgcaccgtgccgtccaatttgatatcgccaaacggattcttgcggcttaacagcagcgcacgaagcgcggtaagcagctggtcatgccgccccttctccaggctggcaccggaggcctccacaacgctgcaaagctcctcctgcaacatgtcaaagtagtcatcatccagatcggtggcaggcgtgccggtctgggggttaccacgggtacgggggattaccaaaggcagcacctttaagctccgcaagacgttctgaccagtcatgcgccagcgcgttgtcttccgcagtgtaatacgcggcacatttggcgttatcaccatcagtaaacagatccagaacaaacgggccaaacagggtgttaattccccagaaaatgttgtccggcgtgcgccactgatcgcccacttccttcagttcatgggctggtttgttccgcagctccaccagcgcctggcaatatttattactcattaagcccccacgtaattccctgagagataccactcttcacctgatgcagcccgcttactgcttttccgtaaacaccgttcacgacgcgccagaaaattgtttcgttctggctgggagtggctttcacggaatgccgccatccacaccgttgcagcacgacggtataagcccctggactccagttcttccgcctggcgggtcaggcacaaaatcacccgcgggtcgttagtgccgacatagaaattgcgcacaggtctggtttcacgaactggttgtggttccggatcctgcgctctctcagtcaggcgcgggaaatgtctgtgtgtatctccttcacaacggtgagccacacgcccactctgacgtaacttgcttgctgactgcagaacgcgctgccgtgagtaacctgcaaaagcatccgcaatgtctccggaagtacagcccggatgggcttcaatgaatttctgaacgtcattcaaaagactcatgctcaccccctgaatcctgccgggatctggctgtagtccacattgtcgtaactggctttgaagtacgggtcttcgcgtttttctgtgtacgtgctgacggacggcgataagcgcagggaaagctcatcccatttttcccgcagcttcgacgggctgagcacgttacggcaccagaacggatcgcggctgacgcggctgtacatctcgcagatttgtttgtgagtacgaccatcctgcacacacatcaggcgaatttcgtttgcccaggctgtccagttcggttctttgggacgaaccacctcgccgtcacattcggcggcctgctcgtacagggcgatgatttttttccagagccactgtgcgcaggtcaaatcatcctgcgttccccactggcgctttttagggctgaatacaaccgcatcaggatggcgagttaaaaaatcctgttcatccgtctgcgtgtccggttgcgaagcgtccggacgagaaggttttttatctgacggatcatgttttgattttactgacggatccccgccagattctgacgggtgaaaacccgattttttgccagatttcgacgcatcaaattttgacgggtcagattttgatgcgtcagattttgacgggtcagagtctgacagttgagaaaatgccgctgcctgaagcttcgcaacgttaagctgataaacattcgacgcattgcggttatgatgaggagcagcaaaatggctagcgaacgcagtactgatgtgcaggcatttatcggggagctggacggcggcgtatttgaaaccaaaatcggcgcagttctcagtgaagtcgcttccggtgtgatgaacacgaaaaccaaaggtaaggtctcactcaacctggaaatcgaaccatttgatgagaaccgtctgaaaatcaaacacaaactctcatatgttcgcccgactaaccgtgggaaaatttccgaagaagacaccaccgaaacgccgatgtatgtcaatcgcggtggtcgcctgactattctgcaggaagaccagggacaattactgactcttgccggtgagcctgacggaaaactccgcgcagcaggtcattaatatcattcttaattaactaattatttatctcatcactgaatatcttaatatagtgaggacttattatgtctcagaacttagacgcaaccgcaattaatcaaatccatgcccttatttctgctcagggtgttaatgaaattatcagtaagattggtgccgatgctgtggcattgcctgagaatttccgcattcatgatctggaaaaatttaatttaaatcgcttccgtttccgtggtgcgctttccactgccagcatcgatgactttacccgttattctaaagatcttgcagatgaaggcacccgctgctttatcgatgctgataatatgcgtgccgtcagtgtgcttaacctgggtactattgatgaaccaggtcacgcagataacaccgccactctcaaactgaaaaagacagcaccgttctctgccctgttgtctgttaacggcgagcgtaactcccagaaatcactggcagaatggattgaagactgggccgactaccttgtgggctttgatgctaatggtgacgccattcaggcaacaaaagcggctgcggcaatccgtaaaatcacgattgaagcaaaccagaccgctgattttgaagataatgacttcagcggcaaacgctccctgatggaatctgtcgaagcgaagaccaaagacattatgccagtggcatttgaatttaaatgcgttccgtttgaaggtctgaaagaacgtccgtttaaattacgcctcagcattatcactggcgatcgtcctgtactggttctgcgcattattcagctggaagcggtgcaggaagatatggctaacgaatttcgtgatctgcttgttgagaaattcaaagacagcaaagtagaaacctttattggtactttcaccgcctgatttcattactgcaaatgcccctgcgggggcatttatggaaacgtaattaactcaataatcaccggatggtgagggcttccttttacccaaactcagcgcggtgcagcgcatatacgtggagaacaaaatgtcatttattaaaactttttccgggaagcatttttattatgacaagataaataaagacgacatcgtgattaacgatatcgcggtttccctttcaaatatctgccgctttgccggtcatctttctcacttctacagtgtcgcccaacatgcggtgctttgcagccagctggtgccgcaggaatttgcttttgaagcattaatgcatgatgcaacagaagcgtattgccaggacatccccgcaccactgaaacgccttcttcctgactataaacggatggaagaaaaaatagatgcagtaatccgtgagaaatacgggttacctcctgttatgagcacgccagtgaaatatgccgatctcattatgctggcaaccgaacgccgtgatctcgggcttgatgatggctctttctggcctgtactggaaggcatcccggcaacagagatgttcaacgtgattccactggcaccgggtcatgcctacgggatgtttatggaacgttttaacgatttatcggagttacgcaaatgcgcatgaatgttttcgaaatggaagggtttcttcgcgggaaatgtgtaccgcgagatctgaaagtgaacgaaacaaatgctgagtacctggtacgtaaattcgacgcgcttgaagctaaatgtgcggcactggaaaacaaaataataccagtgtcagctgaactgccaccagcaaatgaaagtgttctgttatttgatgctaacggagaaggctggctgattggctggcgttctctctggtacacctggggacaaaaagaaaccggagaatggcagtggacatttcaggttggggaccttgaaaacgtcaatatcactcactgggcagtaatgccaaaagcaccggaggctggagcataatgaccacatttaccaataaagaactgattaaagaaatcaaagaacgaatcagcagcctagaggttcgagacgatattgagcgccgtgcttatgaaatcgcactcgtatctctggaagtagagccagatgaacgcgaagcctatgaattattcatggaaaagcgtttcggtgacttagtagatcgtcggagagcaaaaaacggcgataacgaatacatggcatgggatatgactctcggttggatcatctggcagcaacgagctggtatccatttttcaacaatgtcacaacaagaggtgaaataatagagccatacagcctcacactcgatgaggcctgtcagtttcttaaaatatcctgatctaccatcgccgtcatagagcgtatttttattacctgatttgcaggttcgattccctattcggagatagcactcatgcaacacgaactacagcctgattcactggttgatttgaaattcatcatggctgatactggctttggtaaaaccttcatctatgaccggattaagtcaggcgacctgccaaaagccaaagttatccacgggcgagcaagatggttatatcgtgaccattgtgaattcaaaaataagctcttaagccgcgccaatgggtaaaatagcgggtaaaatatttctcacatctaaaaaacaccattccaatcaatcccctgctgcttcaagtagatgtctgcaggggacaccatccttgtgtttatccctaaaaccacataaaaaccgtaaattaaattcgaactagcaggccgaataaggcacaccaggaactcgtggttttattcattatgaagtggtttttacctgttctcttagccagataataaacgcttcaatttttggccactgcctgcccggtaatgtggtgatgtaataatgctgatggcatttcaccgtcatatcgccaaacggcgcgacgagctcaccactggcaagccttttttgtaccaggcgttttcttcccatcgccaccccaatatgattcatcgcggcaataacagctaaatcagaacgatcaaagccaattccagaagatgtcggcaaattaaccgcataatgttgcgcccaactatgccattcatccgtaccggagtcgttgctccatgcctgtctgtcatggagcaacgtacagtgacacaggttaattaccgtgttggttaaagcatgtctttgagcgtattccgggctacatactggcaggatttcttcatccatcagaaagtgatgagtgagttgcgctgacggcgcatcatcaaagtagatcgccaaatcgattccggcacgttgcagattgacgttgtcattaccagtgagcacggtgagcgaaatagacggataccggcgtgtaaagtcacctaatgcgggcaccaaccagcattgggcgatagagggccgggaatacagagttaacgttcccgataactcctgatttttgatatcaagaatttcctggttcagggtatccagcgacgattttagcgcccaataaacacgtttcccctcgtgcgttaattccactttgcgatgggaacgaacaaacaactgaatgcccaattcttcttccagctgattgatacggtgacttaccgcactggggctcagcgacaattcctctgccgccagggcgaaggactgatgcctggcagccacttcaaaagtatgcatttttgataattgccagccgttaagcagccgatttcttatttcacgaaggggttccataatcacctcatttttcgcttaagtgtaaaaaaatagcggcaaaatttcagctatgagatgagctaaagtgaaccatatctcaattcaccttcatttttagatgtaaatcactccattgatgcaatttacctcatgtgaaaggcaaattttatcgtttgtcagcctgcgttgtttttttgtccaatatcatcaggttaatcacaggggaaggtgagatatgcactctcaaatctgggttgtgagcacgctgcttatcagcatcgtgttaattgtactgaccatcgtgaagttcaaattccacccgtttctggcgctgttgctggccagcttcttcgtgggaacgatgatgggcatggggccactggatatggtaaatgctattgaaagtggaattggcggaacgctggggttcctcgcagcggttatcggccttggcacgatactgggaaaaatgatggaagtatccggggccgcagaaagaattggtctgacacttcaacgctgccgctggctttcagttgatgtcattatggtgctggttggcctgatttgtggcatcacgctgtttgttgaagtgggcgtcgtgctattgattcctctggctttttcaattgccaaaaaaaccaatacctcattattaaagcttgccattccgctatgtaccgcattgatggcagtgcactgcgtggttcctccacatccggctgctttatatgttgccaataagctgggcgcagatatcggttcggtgatcgtctacggtttgctggttgggctgatggcatcactgatcggtggcccacttttccttaaatttctgggtcaacgactgccctttaaacctgtacccacagagtttgcagatctcaaagttcgcgatgaaaaaacactaccgtcattaggcgcaacgttattcaccatactgctacccattgcgctgatgttggttaaaacgattgccgaattgaatatggcgcgtgagagtggtttgtatatcttggttgagtttattggcaaccctatcactgccatgtttatcgccgtgtttgtcgcctattatgtgttgggtatacgccagcatatgagcatggggacgatgctcacacatacggaaaatggcttcggttctattgctaatattttgctgattatcggggccggaggcgcattcaacgccattttaaaaagcagcagtctcgctgatacgctggcagttattctctccaatatgcatatgcacccgattcttctggcctggttagtggctcttattctgcatgcggcagtgggctccgctaccgtggcaatgatgggggcaacggcaattgttgcacccatgctgccgctgtatcccgacatcagcccggaaattattgcgattgctatcggttcaggtgcaattggctgcactatcgttacggactcgcttttctggctagtgaagcaatattgcggcgctacgctcaatgaaacatttaaatactatacgacagcgacatttatcgcttcagtcgtcgctctggcgggcacattcctgctgtcatttatcatctaagcgcaaagagacgtactatggaaaacgctaaaatgaactcgctcatcgcccagtatccgttggtaaaggatctggttgctcttaaagaaaccacctggtttaatcctggcacgacctcattggctgaaggtttaccttatgttggcctgaccgaacaggatgttcaggacgcccatgcgcgcttatcccgttttgcaccctatctggcaaaagcatttcctgaaactgctgccactggggggattattgaatcagaactggttgccattccagctatgcaaaaacggctggaaaaagaatatcagcaaccgatcagcgggcaactgttactgaaaaaagatagccatttgcccatttccggctccataaaagcacgcggcgggatttatgaagtcctggcacacgcagaaaaactggctctggaagcggggttgctgacgcttgatgatgactacagcaaactgctttctccggagtttaaacagttctttagccaatacagcattgctgtgggctcaaccggaaatctggggttatcaatcggcattatgagcgcccgcattggctttaaggtgacagttcatatgtctgctgatgcccgggcatggaaaaaagcgaaactgcgcagccatggcgttacggtcgtggaatatgagcaagattatggtgttgccgtcgaggaaggacgtaaagcagcgcagtctgacccgaactgtttctttattgatgacgaaaattcccgcacgttgttccttgggtattccgtcgctggccagcgtcttaaagcgcaatttgcccagcaaggccgtatcgtcgatgctgataaccctctgtttgtctatctgccgtgtggtgttggcggtggtcctggtggcgtcgcattcgggcttaaactggcgtttggcgatcatgttcactgcttttttgccgaaccaacgcactccccttgtatgttgttaggcgtccatacaggattacacgatcagatttctgttcaggatattggtatcgacaaccttaccgcagcggatggccttgcagttggtcgcgcatcaggctttgtcgggcgggcaatggagcgtctgctggatggcttctatacccttagcgatcaaaccatgtatgacatgcttggctggctggcgcaggaagaaggtattcgtcttgaaccttcggcactggcgggtatggccggacctcagcgcgtgtgtgcatcagtaagttaccaacagatgcacggtttcagcgcagaacaactgcgtaataccactcatctggtgtgggcgacgggaggtggaatggtgccggaagaagagatgaatcaatatctggcaaaaggccgttaataacgtttcaacgcagcatcgcaatcctttccctgggtgagcgatgctgccgatggcgcagacttaagatccccggtcttacccgctataaccccctccttttatcatcacccaacgcctttcgctgtaaacggcggtttcgcaaaccaaaccaaaaccgtaagtaagataaaagcaatagccgccatacggaaaatctcatttgcagaaatagaaagtgactgctgggttatttcattattaatttcattaagaactcctgaaagcgaaccataatatttatccataatttgtgacgatgaattaaacacggggttaaattgatcgatggttgctgtcaactgactatggtgtaacgattcgcgtcgtccccacagcgtcattgtcaacgacgtaccaactgatcctgacaaggtacgaaaaaaattactcatactcgaggcattggcaaatttattatctggcaagcctgaaaacgaaatcgttgttaagggtaaaaagaaacaggcaacggcgaatccctgaaaaaactgcggcaaaatgatgcctgtaaaatcaatcgttggcataaatgtcacagaacgccagtaatagcaaaccgcatacatcaaaaaactaaatgtcactaacaaccgcatgtctattttgttgccataacgtcctatcaaaggtgaaattaatagtggcatgatgccgatgggcgcataagcaagtccggcccatatcgcattataccccatcgtttcctggagtaactgcggcataaggacgatcgctccagagtaaaataaatacgcgcatgtgatactcacaataccaatggtgaagttacgggacttaaacaaactgagatcaagaatcgggttctctgaggtcgactcccaaatgactaaagagatcagagaaataactgatactactgttaatattattattgtactcgagttgaaccaatccagatcgcgccctttatcaagcataatttgcaagccaccaacaccgagcactaacagggtcagtcctggtagattcattttgaccggtgaagtctcagtttctcttcctttaagtaaggttaagcataatgtcaggacgataatccccatagggacattgattaaaaatatccaaccccagctaaagttatcacaaatataaccgcccaatatcggcccacatatcggagcgataatcacggtcattgaccataatgccagagcaaatgttcttttttctggcggataattccttaataataaactctgtgacagtggaattaacggccccgccattaacccctgaacgactctaaaaaatatcagcacatcaagattggtcgataggctacacattaatgaagacagcgaaaaaaaagtgactgaaagtaaaaataatcttaattcgcctattctttgtgccaacctgccagtaacagggatcgcaatggcatttgctacaccaaacgaggtgataacccaggtgccttcgtctgttgatgctcccagaaagccagatattgtcggtattgcgacgttagaaatagtggaatccaacatttgcataaatgtcgctaatgacaatgcaatagtgacgcaccataacgtttattattaattaccggttaatggtgccggagttgatttagtgattgccattaaagttgtccattatgcgaaataatgttgctaatttctttttctatcggactggtatcgataactaaagccttactggtataagccggcatggaggtcacggttgaagccagctcaggcatctcggcaatgtcttcgttcttcgtatcaatagttgctgtcatcgataaaccaatacgcaaggggtgttccatgagttcttttggatcaagagaaacttcaaccggtacacgctgaacgattttgatccagttccctgtcgcattttgtgcaggtaataaggagaacgcattgccggttcccatattgatccctgtcacccgaccatgaaacacaacattttcaccataaagatcgctgataatattgaccgattgaccaatccgtacatccgtgagttgtgtttctttaaagttggcattaacccacatttgacgtgccggtacgacagccattaacgattgtccggggctcactgtttcgccgacctgaacacttctctgggcaatatagccggtaaccggactcttaatatccgtacgtttaagcgccaaccaggcttctttagttgcatccgccgcttcaacgacttgtggctgacggtttaatggtgtgttcattactaaagctttattcgctttataagcctggatagcggcattcaatgccgctttgctacttattaacgtatctttggtatgctccagcgtttcttttgaaataaccccctgcttcgctaacggcactcgacggttataatcttctaaagattgttgatactgaatacgtgctgaagcgacttcggcactgtattgtttatcctgtaagtatagtttattcgtttgccgaacaatatttgccagattatttttagctttattgagtgcgatagtggcatcagttttatccagtgaaactaaaatgtcaccttgtcgaacgtagttcgtatctttatgattaacgacagtgacactacctgagacttgtgcagaaattggatctgcattccccgtgacataggcgtcatctgtactaatcatgtcttctaattccattgaccaataggcataggcacctgaaaacgcaataaataaaactaccgccaataaagaaaagtattttcttctgttagaatgttttttatttgaattaatctgttccactattatctctcatttctcatagatgaaatttatgaattgaatgaaaagagcattcattcttcatatcaaacacagtgcatgtgttgcacattatcccaggaacgttggaggcctaatttaaatgaggtgcaaaaaaaacaacagaggactaaaccgtggcttttgcaatacaattcttacgcctgtaggattagtaagaagacttatagtgccaacttgaaactataaatcatcggtacaatccctgattttattgttgacatttcatttatgccgactatttatatggtatacttgtcgaattatcttaaaggaagctcagattttcttatttttattgagaaaatgagatgacgccttatgtctgtattactacagggagaagggagatgcttcattgcaaagggaataatctatgaacgcaataattattgatgaccatcctcttgctatcgcagcaattcgtaatttattgatcaaaaacgatattgaaatcttagcagagttgactgaaggcggaagtgccgttcagcgggtggaaacacttaagcctgatatcgtcatcattgatgtcgatatccccggagttaacggtatccaggtgttagaaacgctgaggaagcgccaatatagcggaattattattatcgtctccgctaaaaatgaccatttttacgggaaacattgtgctgatgctggcgctaatggtttcgtgagtaaaaaagaaggcatgaacaatatcattgcggctattgaagctgcaaaaaatggctactgctatttccccttctctctcaaccggtttgttggaagtttaacgtccgaccagcaaaaactcgactccttatcgaaacaagaaattagtgtcatgcggtatattcttgatggcaaggataataatgacattgctgaaaaaatgttcatcagcaacaaaactgtcagcacttataaaagtcgcctgatggaaaaattagaatgtaaatcactgatggatctttacacattcgcacaacgtaacaaaatcggctaaccacatgaagtttttaccctatatttttcttctctgttgtggtctttggtcgaccataagtttcgcagacgaagattacatcgaatatcgtggcatcagtagtaacaaccgtgtcacacttgatccactacgtctgagcaacaaggaattacgttggttagcgagcaaaaaaaatcttgtgattgcagtacataagtcccaaacggctacgttgttgcataccgattcgcagcaacgggttcgtggtattaatgctgattatttaaatcttttaaaaagagcgttaaatatcaaattaacactccgggaatacgcagatcatcaaaaagcaatggacgcgcttgcagaaggtgaagtcgatatagtgttatcacatttagttacttcgccgcctcttaataatgacattgctgcaaccaaaccattgataattacctttccggcgctggtaaccacccttcacgactcaatgcgaccgcttacctcaccaaaaccagtaaatattgctcgggtagcaaattaccccccagacgaggtaattcatcaatcatttccaaaagcaacaattatctcttttacaaatttatatcaggcattagcatccgtctcagctgggcacaatgattactttattggtagtaacatcattaccagcagtatgatttcccgctatttcactcactccttaaatgtagtgaaatattataactcgccgcgtcaatataattttttcttgaccagaaaagaatctgtcattcttaatgaagtactcaatagatttgttgatgctttaacaaatgaagttcgctatgaagtatcacaaaattggcttgatacaggaaacctggcctttctgaacaaaccattagaactcactgaacatgaaaaacagtggattaagcagcatcccaatttaaaggtgctggaaaatccttactcgcccccctattctatgacggatgaaaatggctcggttcggggcgttatgggggacattcttaatattattaccttgcaaacaggtttaaatttttctccgatcaccgtttcacacaatatccatgctggaacacagcttagccccggaggatgggatataatacctggcgctatttatagtgaagatcgagaaaataatgttttatttgctgaagccttcataacaacgccttacgtttttgtcatgcaaaaagcgcctgacagtgaacaaacattaaaaaaaggaatgaaagttgccattccatattattatgagctgcattcgcaattaaaagagatgtatccggaggttgaatggatacaggtcgataatgccagcgctgcatttcacaaggttaaggaaggtgaacttgatgctctggtcgcgacacagctaaattcgcgttacatgatcgatcattactatcctaatgaactttatcattttcttattcctggcgttccgaatgcatcgctttcgttcgcttttcctcgcggagaaccggaacttaaggatattattaataaagcactgaatgcaattcccccaagcgaagttctgcgcctgacggaaaaatggattaaaatgcccaatgtgaccattgacacatgggacctatatagcgagcaattttatattgttacgacattatccgttttattagttggcagtagccttttatggggattctacctgttacgctcagttcgtcgtcgtaaagtcattcagggtgatttagaaaaccaaatatcattccgaaaagcactctcggattccttaccgaatccaacttatgttgtaaactggcaaggtaatgtcattagtcataatagtgcttttgaacattatttcactgcggattactacaaaaatgcaatgttaccattagaaaacagtgactcaccctttaaagatgttttttctaatgcgcatgaagtcacagcagaaacgaaagaaaatcgaacaatatacacacaggtatttgaaattgataatggcatcgagaaaagatgcattaatcactggcatacattatgcaatcttcctgcaagtgacaatgcagtatatatttgtggttggcaagatattactgaaacgcgtgatctaattaatgcactcgaggtagaaaaaaataaagcgataaaggctaccgtagcaaaaagtcagtttctggcaacgatgagtcacgaaataagaacaccaataagctctattatgggcttcctggaacttctgtcgggttctggtcttagcaaggagcaacgggtggaggcgatttcacttgcctacgccaccggacaatcactcctcggcttaattggtgaaatccttgatgtcgacaaaattgaatcgggtaactatcaacttcaaccacaatgggtcgatatccctactttagtccagaacacttgtcactctttcggtgcgattgctgcaagcaaatcgatcgcattaagttgcagcagtacgtttcctgaacattacctggttaagatcgaccctcaggcgtttaagcaggtcttatcaaatttactgagtaatgctctcaaatttaccaccgagggggcagtaaaaattacgacctccctgggtcacattgatgacaaccacgctgttatcaaaatgacgattatggattctggaagtggattatcgcaggaagaacaacaacaactgtttaaacgctacagccaaacaagtgcaggtcgtcagcaaacaggttctggtttaggcttaatgatctgcaaagaattaattaaaaatatgcagggcgatttgtcattagaaagtcatccaggcataggaacaacatttacgatcacaatcccggtagaaattagccagcaagtggcgactgtcgaggcaaaagcagaacaacccatcacactacctgaaaagttgagcatattaatcgcggatgatcatccgaccaacaggctattactcaaacgccagctaaatctattaggatatgatgttgatgaagccactgatggtgtgcaagcgctacacaaagtcagtatgcaacattatgatctgcttattactgacgttaatatgccgaatatggatggttttgagttgactcgcaaactccgtgagcaaaattcttccttacccatctgggggcttacagccaacgcacaggctaacgaacgtgaaaaagggttaagttgcggcatgaacttatgtttgttcaaaccgttgaccctggatgtactgaaaacacatttaagtcagttacaccaagttgcgcatattgcacctcagtatcgccaccttgatatcgaagccctgaaaaataatacggcgaacgatctacaactgatgcaggagattctcatgactttccagcatgaaacgcataaagatctacccgctgcgtttcaagcactagaagctggcgataacagaactttccatcagtgtattcatcgcatccacggtgcggctaacatcctgaatttgcaaaagttgattaatattagccatcagttagaaataacacctgtttcagatgacagtaagcctgaaattcttcagttgctgaactctgtaaaagaacacattgcagagctggaccaggagattgctgttttctgtcagaaaaatgactaaatagcggctcccacaatgttcaaatgtgggagctatttaccagcacatcttacatttatgatgagaactcctggcgaatttgttccccatgctggtcgagcgttgccgctcccggcataacatgcgggtccgcgcagccgctgatttttatcggattacccggcatcattattcccccggcttcaatcaacatatttctcgcctgagtttgtggcaatttaatggcctcagccacacttaataacggcgcgacgggtacaccaacttcatgtattctggctaaccaaacttcagctgcctgcgtttttaacgtccgctcaatatattgtttaagaatagcctggttttgtacgcgtaaaatattgctgctaaatcggggatcattaaccagttccgtaagctccagtgcctggcataacgcagaaaaaagcttgtcattaccacaacaaatcgtaatcggcttatcctgagtattgaaaacatcaaaaggtgccatgtagggatggcgatttcccagacgttgtggtgacttcccagttgcgatatatgccatcagaccatgctccagaaaactcagcgtggcatcaaacatcgctatatcgacatgcgcccctctctggctcttttcgcggccataaagtgcactcactattccgctgaataaatagacaccgccgcatagatccgcaagagatgtaccaacgcgcactggcggagcatcaggatatcctgtttccatcattatcccgctcattgcctgaatgatggtatcgtaggcaggagcatcttttagcggaccggtatgtccgaaacctgacgatgaagcatatatgaggcgcgggttgatttcttgaagcgtttcccatgaaaaccccagtttttccattgtacctgggcgaaaattctcagctaatacatcagcttgtttgagcatatttataaatatacttttatcgtgatcattctttaaatcaagaaccacactctctttgccatgattaataaaactgtaatagagtgactgtccatccacatagggaccaaatgtgcgggtatcatcaccatgacccggcggctcaactttaattacccttgcgcccatattacaaagaagttgagttccgaaaggtccattaaggacatgtgtcatatcgataactaataagccttcaaacggccctttgctttcattatttgtcatttgcttatgccttgaaaaaagccgaaggtgaaaagacacttcggcatttatgtaaaatcaataacatgattaattatgaaaccagtcgactgacataaatccacaagggagccgtgacgacaaagcccagtacgctcacagccaatgacgctgtaccagtacgggtgtagacattaaaccggctggcaataatgattccggagaatgccggcggtaatgcgcctgccagtaccatcatctgcagatgttcgctgttcaaatgacatgccataccaacgagaagcagtgccagtggcatcagaatcagcttcaggaaggtgttataagcaatttcggcactgaactcgaatttatgtgcagccagagtcaaccccgcagcgaataccgctacccctgagttagccttcgcaatcagattaaaggttgggtcccatgctgccggaatttttaccccaaccaacaccaggatcgttgccagaacaggtgcccatactactggctcctttgccgcagaaattaatgcgctcagattactattcttcttaccatccgctcctgaagaaggattcagcaaatacagaccaataggaatagtaattgcgttaacaataatagaaataattgctaccactaaacctgttgatacggaatcaccataaataggatcgagaactgcaaaccccaggaatccaatggtaggtgaacctgcaattaatgcacatacagctgcttctgcatgggtacgtttaaaaaatttgtagcaaccgaaccaggagaaaaagaaacatccgacaataaccacaagtgatacaagggtcagacgagtgtccgcaaaaatcatttccctgtttgcccgagtaatagatacaaatagagccgcaggaagcgcgtagtttaataccagtttattaaatgcccgagcttgatcttctgaaaatgtttctcgtctgccgctaaaataacccaacagcatgattacgataataggcaataaatcgccaataaaaaatgttagcataatagtatttccgataagggtcccctcaccatcgcataatgagttggcaagaggagacgatgtcagtatttaattaccagcgacttgttttgggttaagtttggtaatatggccactttcagttcctgctgcagggtcgatgaccacattaataatggtcggtttgcgcgactgaataccggtggttaaagcatgacgaagttcatctgtcgtggtgacgttatagccaacgccacgaaacgcatccattaatttgtcataccttgcatggtgcaacagatccgttggtgatggtgcaccagcgccactgagatcaacaccgtctcctctgtagatgccgccattattaaaaataacgatcgtcaccggcaggttatatcgacaaatcgtttcaatttccatcccactgaaaccaaaagcactatcaccttcaatggcgacaaccggagaaccagaagtcacgctagcaccgatggcatagcccataccgatgcccatgacaccccaggtaccacaatccagacgacgacgtggtttatacatatcaataatatttcgtgcattatccagggtatttgcaccttcattaactaaataaatatcctggttctcgcgcaatacgtcgcgcacagcacttaatgcattaaagtaatttaatggttgagtatctgtacttaatttttcatgcattttttgtgcattttgctgcttgtggatatttaaaatatcgcgccataccagtggagtcgtaaatgtgttttgtttcagttctgccagcataccttgcatactggatgcaatatcaccaacgactggcacagcaatggggcggttgctgtcaatttcctgcggttcaatatccagttgaataaactgtgtatctgccgcccatccttttttaccgtgtgccaataaccaattcagtcgtgcaccaacaagcatgacaacgtcagcatttgccagggcaaacgaacgcgcagctgccgcagaaagtggatgcgtatcttcaaggatccctttcgccatagacattggcaggaatggaatctgagcactttcaataaattcacgaagctgttcatcagcttgtgaatacgccgcgcctttgccaaggataattaatggccgttcagcttttgctaaaagcgaaattgcgctagtgactgacttcgggcatggcaataatgctggcgacggattttcaactttaacaatcgtggttaacgcttcgtctttttccatcgtcgcggccaggacatttgctggcaaatcaagataaactccgccagggcgacccgatacagagacccggatagcgcgtgccaatgcaatgccaagatcctgcggctgattaacgcgaaatgctgctttggcatacggttttgccgcattcatttggtccagctcttcataatcaccttgctgtaggtcgacgatcgcgcggtcgctggagccgctaatcatgatcatcggaaaaccatttaccgttgcgttggccaatgcggtcaaaccattgaggaatcctggcgcagaaactgtcaggcagatccccggtttttgggtaagaaaaccgcttgccgcagcggcatagcctgccgactgctcatgacgaaaaccaatataacgaatgccttccgcctgggcatggcgtgccatatccgtcacaggaatacctacaacaccataaatagtgtcaatattattctgttttaatgcttcaacgatgatatgcataccatctgtcatttgaagttgatctgacatgattaataacctcgaaatttttataaattgggagccagaagcccccgttaatatcagatggcgtggttttgcttcattgcagcaatttcatcgtcgctataacccagctcctgcaatacagcagcggtatgttcacctaatagcggcgcagctttaatatccggcgtaaaggcagagaatttcattggacaaccaacggtcagatattttccacgcaacggttgttccacttcaacaacactgccactttggcgcaaagagggatcaagtgaaatttctttcatacttaaaaccggtgcacaaggaatatcaaactgagtcaaataggccaccgcttcatgtttatcaatagtgacagtgtatttttcgatttcagcaaaaatatcgaaaatatgtggctgtcgtgcatgggctgtactgtatgccggatcggtaatccattctggtttgccgatggctttacaggtgttttcccagttttgctcctgaatagtgaaataaatataggcgttaggatcggtttcccagcctttacatttcaggatccagccaggctgaccgccaccacctgcattaccaccgcggggaactgcatcaccaaatgtaccattcggatactgcgggtattcttccagataacccaatttatcgagacgctgctggtcacgtaatttcacgcggcaaaggttcaatacggcatcctgcattgacatggtgactcgttgcccacgccccgttttttcgcgatgcagcaaagcagcaagtaaaccgatcagcaaatgcattccggtgttgctgtcacccaacgctgcagcgcttaccagcggcggaccatcccaaaaacccgtagtggatgccgcgccacccgctgcctgagcaacgttttcataggcttttacattcacataaggcgaacactcatcaaaccctttgatcgaaccaaaaatcagacgtggattgatttcttgaatatgctcccaggtgaagcccatgtgatcaatggcccctggatgaaagttctcgactaagatatcagcttcgcggatcagcttttccattacctctttgccttccgctgttttggtatttaactcaatagaacgtttgttactgttaagcatggtgaagtaaagcgcatcgatatcaggaatatctcgcagctggtgacgcgttacgtcaccaacgccgggacgttcaattttaataacgtcagcgccaaaccaggccagcatttgagtacaagatgggccagattgcacaccggtgaaatcgagaactttaattccttgaagtggagttgacatagcaatacctattagttaattaaatatgtgttaatttagcgtttatttaaggcgtaatatcttctataaataacccgcaaaatatcgtcgtagctgcactcgatatttttaaaatcctgtatcaagtgctgaaaatcatttcatcgccacttccaattcctttctgcatggtaagtagtgaggacgaaaagaagaatatgataaatattgattcgtggtaatcagagagagtcgcgacatttgtgatgttattcttacaactgtaagaagcgccggtgatttacaagcaagggtatgattacgctttttaaagcgtaccataaaacataacataataaatgatttgtgatgacacgggattattgcggtttactttgaggaatataaaatgcgagtttatagcaccgcgagcgccaaataattttatgaccacaacctgtcgtattgtggtcataaaaaattgtcggctggagggagttaaatcctttacctcaatatactgcctgtcagcattagttcacaaacagtgcttcgctatcgacgatgattccatcttccgcacctttaagcgccaggtttgcctcgtagtattgctttttatcaagcagtttctgcgcatcagcaagtgcattacgagtctgtttaagtggcatcagatattggttttccattacgccaacaccggccaggcgaagctcttccattgcgccctttttatcccctttcgccattttttcattggcaatttttatcgcggcttctttttcgggagttgctacataactctcagaaattccgacagatgcattaatgacaatatattggtcatcattgagattggtctttttacctggcttagcgaactttgcccattcggtactgtcatctgacagcaaagcggaagcttcattggtcagttcttttgccttttctggatcgccatgaaacagagccaggcgcgctacctgcacgtcacgcatcgcatataaaccttgttcagagatacgctctgctgccgctgccgttttctgggtttgctgaacttgctgagtttgctgttgtgccgctaccggagcattatcagcagcccatacagttgaagatgccagaattgctgtgaccatcgtggccataattaaacgtttcatacttacctcattctttaacagttttagaaaacgccgccatcatattgggtgagcatgaaatgagaaatcagagagcaacggtcattttgaaagggttatcttacagttgtagttattatcgcaagaagtattttagtcttacaattgtaggaatatgcttcctgtcgcagagaactattcttatataccacaaagagatgtcatttattatatcgatgtaaatactgattaattaaatgtaaatacagccataacatcgtaggttctcagtgaaccattttcaggataactttctatgaaagtaaacttaatacttttcagcttatttttattggtctctattatggcatgcaatgtttttgcattttccatttcgggtggtggaagtgagaggagctataaagagactgaaaaaacatcagcgatgacgaccacacactctacaaaacttcagccatcacaggcgattttgtttaagatgagagaagatgcgccaccattaaacctcacagaagaaatgccgcccccttttccgacaaaggcgaattatcttattcatcctgtgcgatagcgtctttcacatggcaggtgaacaatcatgtctgatgctgatgtgaacacctgcccaaatgagccatcctgacccactaccgcctgccataccccaccataaagcgaatcatcaagccacaagccggggcaagaaacataaatatccccgtcactagttcattaccgccagttaaccacatggtgaagtaataaatgagtgcagcgaggatcaccatgccgaagaaagaagagaccgccgataccacgttcagtacctgaccgatgtagccgcttacgcagacaatacacagggcgagaaacatccataaattaatcatagctcaacctcctgccgcgctaaaaaacctgtaacttcagtcactttaatagtaagacaatccttaacctctggcaatttttgctaagcatcaatgaaaacagcatgttaaatgcaagactgttgtgtacggaaaaatatttactttgcacgattaataatcagtagctgaaagcagtcagcgagtgataaagtacagataccgcattcatgctcctcgtggttatgtcctgactagtctttacactctttacaggaaccattgtcgtacatgatggcccaaccaattgagtgtaccgctgtcgacatggaatcttctgcgatacaacaattcgtatctacagaaggtaactatgtttccacaatgcaaattttcccgcgagtttctacatcctcgctactggctcacatggtttgggcttggtgtactctggctttgggtacagcttccttatcctgttctctgctttctcggcacgcgtattggcgcaatggcgcgaccattcctgaaacgtcgtgaatctatcgcccgtaaaaacctggaactttgtttcccgcagcattctgcggaagaacgcgagaagatgattgccgaaaactttcgttcactcggcatggcgctggtagaaaccggcatggcatggttctggcccgacagtcgcgtacgtaaatggtttgatgttgaagggttggataaccttaaacgcgcacaaatgcaaaatcgcggcgtaatggttgtcggcgtccattttatgtcgctggaactgggcggccgcgtgatgggactgtgccaaccaatgatggctacctatcgtccacataataatcagctgatggaatgggtgcagacccgtgggcgcatgcgctctaacaaagcgatgatcggcagaaataatctgcgcggcattgtcggtgcactgaagaaaggtgaagcggtatggtttgctcccgatcaggattatggtcgtaaaggcagctccttcgcgccgttctttgcggtggaaaatgtcgccacaaccaatggcacctatgttctctcccgtctctctggcgcagccatgttgaccgtaacgatggtaagaaaagcggattacagcggatatcgtttgttcatcaccccagagatggaaggctacccgacagatgaaaatcaagccgctgcctatatgaacaagattatcgagaaagagatcatgcgcgcaccggagcagtacctctggatccaccgtcgctttaaaacgcgcccggtgggagaatcgtcgttgtacatttaacaaactgctcttactctttccctcctcaaatcggccataataacctcatggtttttatggcttttttcttaaggttttttccttcgctgaatatctaattattaccgtcagaaattaaactgtcgccgatatgagacacttgtaagttactaaaagtaaataagaaaatgcctcttgtctcgtttcagttttaggcgtacattagcgccgtctcgagcagtttagctcagaattctggggtgatgcccacggtaaaatacagggcttttaaggtcgctttgcccggtgtcaactcactgtatcaggtgtaatgaagtcattcaggcgtaacagtaattacgcggagagatgtaaagtgaaatatttctttatgggcatttcttttatggtcatcgtttgggccggtacttttgccctgatgatctaaaagcaaactgtgcaatgaaaaacaggagccatcaggctcctgtttgcatttctgacgacggtgtttattccgcgttttcgtgaatatgtttgctgctggcgggtagtaaaccgtcggcacggaacatcgctttaatccctctgatggcctgacgaatacggtcgcggttttcaatcagtgcaaagcgaacatgcgtatcaccatagtcgccaaagccaatccccggcgagacacaaaccttcgcttcgttaaggagcttcttggcaaattccagcgatcccatggccgcatatggttccgggattttcgcccagacatacatcgaagccttcggcatttcaaccatccagcccgcttcatgcagccctttaaccaatacatcacggcggcgtttgtactgttcggcaatgtcgcgcacgcactgttgatcgccctccagcgccgcaatcgccgccacctgcaacggcgtaaaggtgccgtaatcgtgatagcttttaatacgagccagggcgctgaccagcgttttgttgccaaccataaagccgatacgccagcccgccatgttgtagcttttcgacagcgtaaagaactcgactgccacatcgcgtgcacccggtacctgcataattgacggcgctttccagccatcgtagacgatatcggcataggccaggtcatggaccaccagcacatcgtagcgtttcgccagcgccactactttttcgaagaactccagttccacgcattgcgcggttgggtttgacgggaagccgaggatcatcatcttcggtttcggataactttcacgaatggctcgctccagttcgttgaagaaatcgacaccttccaccagcggcactgagcgtacctgcgccccggcaatcaccgcgccataaatatggatcgggtaacttggattcggcaccagcaccgtgtcaccatgatccagcgtcgccagcatcagatgcgccaggccctctttcgaaccaatagtgacgatggcttctgattccgggtcgatttcaacgtcgtagcgatcctgataccagcgggaaatggcgcgacgtaaccgcggaatgccgcgtgaagtggagtaaccatgcgtgtccgggcgctgggccacagtacataatttttcgacgatatgcggcggagtcgcaccgtccgggttacccatgctgaaatcgataatatcttcgccgcgccgacgcgcagccattttcagttcagcggtgatgttaaaaacgtagggcgggagacgatcaatgcgcgtaaagcgacgttcagggcgagtgtcagccataatttcctcagattaacgttagcgcccggaccgtccgagcgacgctgccacgatggtggctgttttgaaaatagcctgattaatttctgtctgtccagcgttttagaacattttattaatgacgttaaatgaggaactctgctttaaaaacaggaaatttatctgcgctaacaagaaaattaccactcattttattaacataataatttcaataaatttactaaccagaagtgcattatcaagagatgcattgctaatacaccatttatctatcaatccccttttaaaattgtggtttttcctcaaaaacggcctgctggtcatcagccttcaggttacctatcatagaggtttaatccttattcagagtcacccgtgcacgaaatattcaacatgctgctggcggtcttcgatcgggcagcgttaatgcttatctgcctgttctttctcatccgtatccgcctgtttcgcgaactgttgcacaagtcggcgcactccccaaaagaattgctcgccgttaccgccattttctcgctgttcgccctgttcagcacctggtccggcgttcccgtagaaggctcgctggtgaacgtacgtattatcgcggtgatgtccggcgggattctgtttggcccgtgggtaggcatcattaccggcgtgattgcgggtattcaccggtatttaattgatatcggcggcgtgacggcgatcccctgctttatcaccagcattctggcgggttgtatatcgggctggatcaacctgaaaatccccaaagcacagcgctggcgcgtcggtattctcggcggcatgttgtgtgagacgttgaccatgattctggtaattgtctgggcaccaactaccgcgttggggatcgatatcgtctctaaaatcggcattccaatgatcctcggtagcgtctgtatcggctttattgtgcttctggtgcaaagcgttgagggcgaaaaagaggccagcgccgcgcggcaggccaagctggcgctggatatcgccaacaaaacgctaccgctgtttcgccatgtcaatagcgagtcattacgcaaggtctgcgaaattatccgcgatgacattcacgccgatgcggtggcgattactaataccgatcatgtgctggcctatgttggcgtgggtgaacataactatcagaatggcgatgacttcattagcccgactacccgtcaggcgatgaattacggaaaaatcatcattaaaaacaatgatgaagcccaccgcacaccagagattcattccatgctggtgatcccattgtgggagaaaggggtcgtgaccggaacgctgaaaatttactactgccacgcgcatcagatcacctcgtcattacaggaaatggcggtcggtctgtcgcaaatcatctccacgcaactggaggtttcacgcgccgagcagctacgtgaaatggcaaataaggcagagcttcgcgccctgcaaagcaaaattaatccccattttctgtttaacgctctgaacgctatttcatcgtcaatccgtctgaatccggataccgctcgccagttgatctttaatctgtcgcgttatctgcgctataacattgaattaaaagacgatgagcaaatcgatatcaaaaaagagctgtatcaaattaaagactatattgccattgagcaggcccgctttggtgacaagctgacggttatctatgatattgatgaagaggtgaattgctgcattcccagcctgctgatccagccgttggtggagaacgccattgtccacggtattcagccttgcaaaggtaaaggcgttgtcaccatcagcgttgcagagtgcggaaatcgggtacgcattgcggtgcgagataccgggcacggcatcgatccaaaggtgattgagcgggtcgaagcgaatgaaatgccgggcaataaaattggcctgctgaatgtccatcatcgcgtgaagttattgtatggcgaggggctgcatatccgccgcctggagccggggacggaaattgcgttttacattcctaaccaacgcaccccagtcgcctcacaggctacgttattgctttgagccggagtgatattgtgaaagtcatcattgttgaagacgaattcctggcacaacaggaactgagctggctaattaaagagcacagccagatggagattgtcggcacctttgacgacggtctggacgtgttgaagtttttgcagcataaccgcgtcgacgccatttttctggatatcaatattccgtcgctggatggcgtgttgctggcgcaaaacatcagccagttcgcccataaaccgtttattgtgttcatcaccgcgtggaaagaacatgcggtagaagcgtttgaactggaggcgtttgactacattctcaaaccgtatcaggagtcacgtattaccgggatgctgcaaaaactggaagcggcctggcaacaacagcagaccagcagtacgcctgccgcgacggtaacgcgtgagaatgacaccattaatctggtgaaagatgagcgaataatcgtcacgccaattaacgatatctattacgccgaagcgcacgagaaaatgacctttgtctatacgcggcgtgaatcctacgtaatgccgatgaacattaccgaattttgcagcaaactgccgccgtcgcattttttccgctgccatcgctcattttgtgtcaatctgaacaaaatacgcgaaatcgaaccgtggtttaataacacctacattctgcgactgaaagatctggattttgaagtgccggtcagccgcagcaaagtgaaagaatttcgccagttaatgcatctttaatcgggaactttcatgaaagcaccaggcttgcccgccgatcaacaatttttcgccgatctgttcagcggcctggtgcttaacccgcaactactggggcgcgtctggtttgccagccagcctgcctcgttgccggtgggcagtttatgtattgattttccccgtctggatatcgtgctgcgcggcgaatacggcaatctgctggaagcaaagcagcaacgtttggtggaaggagaaatgctgtttattccggcgcgcgcggctaatttaccggtcaacaacaaaccggtgatgctgttaagcctggtgttcgctccgacctggcttgggttatcgttttacgatagccgcaccacgtcgttgttgcatcctgctcgccagatccagcttcccagcctgcaacgcggtgaaggtgaagcgatgcttaccgccctcacccatcttagccgttcgccgctggagcaaaatatcattcagccgctggtgttaagtttgctgcatctttgccgtagcgtggtgaatatgccgccgggcaattcgcagccgcgcggcgattttctctatcacagcatttgtaactgggttcaggataattatgcccagccgctcacccgcgagagcgtggcgcagttttttaatatcacgcccaatcatctgtcaaaactgtttgctcagcatggaacgatgcgttttatcgagtatgtgcgttgggtgcgaatggcgaaggcgaggatgattttgcagaaatatcatctgtcaattcatgaagtggcacagcgttgcggttttccggatagcgactatttttgtcgcgttttccggcgtcagtttggtctgacgccgggagagtacagcgcccgttttcagggctaacgtcagaaggttaattctgtttccagcagcgtcaggatactttgtgcatcttgcgcggcaaacaacgactggcggaagtttttattcaccagtttacgcgccagctgcgagaagactttcacatgattcatcccttcgttagcacccagcgtcagcatgatcaccagttcgacttcgcccatttctgactgccagccaatcggtttcgccagccgggcaatgctgatactggaatgacggatccactgagatttggtgtgcgggatcgctacgccaaaaccaacgccggtggtaacaatctcttcccgctgccagacatcttcttccagctcaaacggatgttcagtgcgcccgttaacgccgaggttgccgcacaggaactggatcgcctgctctttattgctaaaatcctgatcaacaaagatattctccagcgccagcagtgggcgaacgtcttcttccggcgtaaaggcggtgagtaacgcttcaatttcctgcgcactgcggcattcacatgcctgacgcgccagttcccgacacgcctcgctatccagttgacgaagctggcttttcaccgccggaatacgcgggctactcatactcagctcatccaggcccagcccaagcagtagcggcagataacggctttcaccgcccagttcaccgcaaatgcctacccatttgccccgctgatgcgcagtggtaactatttgctgcaacatgcgcaggaacgatggcgtaatcgggttatatagcggcgatacgcgcgggttattacgatcgaccgcatacagatactgggtcatatcgttggagccgatactgaagaaatcgacctcatcgcagaagtggtcgatgatgtagcacaccgacggaacttccaccatgatcccaagcgtaatcgtctctgcatgacgcaggccatcgcgcttaagctcaacgatcgctttttggatctcgcctttcacccataagatctgatcgaggctgtgaaccatcgggatcatcaactgggcgttgccgaaactggcggcgcgcaaaatggcccgcagttgagtgcggaacaggccagcaaattccgggtaaatacgtaccgcgcgatagccgaggaacgggttctcttcctggggaatattcagataaggaatgcttttatcgccgccgatgtccatcgtgcggaagataatcggcttgtcgcccgccgccagtagcacctgctggtaggcttcaaattgctcctgctcgtccggcgcgctgtcgcgatccatatagagcatttcggtacggaacagcccgacaccttccgcgccgttggcaaacgcgcctggcgcttccagagcggtgccgatattcgccgcaatatcaatacgcttgttatcacgggaataggccagctgcgcggcagcctgcgcctgttgtttttggcgtttatccgccagcgtctgcgcgacctgataataaccgctcaccgcgtcattcgggttaatcgccagcacgccgcactgggcgtcaagcactgcaggttgcccggcataacgggcaatcgcatccagcggcaagccactcagtaccgggatcgccgaggcacgggccagaatcagtgtatgcgaggtgcgcccggttttctccagaatcatgcccgcaagatttttcaaatcaaggctcaaaaactggcttggggttaaatcttcagccaccagaatggtcggtttttcaagcaccagcttgttgcgcggcttcagttccggccaggtgatatgcagcaactgttcgctgatatcgcgaatgtcgctaacacgttcgcgcagataatcgctggcagaggcagaaagtttggcgcaaacctgctccatattgctgatgatcgccgcccccagcccctgatgctgttctgtcatcaggcgacggatattgcctgcaaattcatcatcctgaatcagcgacaaatgggcgctgaggatagttttgctttcgccgtcacgctcacgcaattgctggttcagttgctcggcaagcgttgccaggctgtgctccagccgggtggaatcttgcgcactggcggggattgcccgataactgtcgaggctgtcgctttgtaacagggtcagcgtacccacgccgacgccgcttgccagcacattgccgtacagtaaatccgggttaaggcggcttaatgaacgcggcagcggatgcgccgtcagttctgcctgcgtaggctgaacgctgtcgctgtcgataaagcgcacctggatgtactcttccagcacgcgccgcgcctgctcttcatcgctgccgctaatgttcaggctgcaactgtcattaaatagggtgccggtgccaatcagcgccagcgagcttttcgcatctgcctttgcgttctggcgatggttaataaaagtgatttcgctttgccactggctgcactgttctttaagttcccacgccggacgagcatgtagaccgttaggcaaaggacagagaaattgaatcgttaacataaccgctccgggttaatcaggagatcatctgaaatccgtcagttgaacaaccgtctcacgcgtaagacgttgaataagggcagataaaagttgctgcatctgcaaaatgtcgcggcaatcggcaatcgatgcggcgcaatgtccatggcgggttgctggccccatcaccactgtgggcacgccggtgccggttaagtgcaccgccccgccgtccgtgccgccgttgctgaacatatctgcctgcaacggcacgccaatttctgccgccacggtttcgacccaggcggtaagttttggcggcgcaatcagcgacttgtcgcttaacaccagcatcggcccgttaccaatctggcgatggttagccgcgccataatcaaagtttttcgcccagcaggcggtatcaagcacaatggcgacgtccggcgacaccgcgcgggtggcagtttgcccgccgcgtaatcccacctcttcgctggaacttgccaccagccacacttccgcaggtagttcggcgtcgtgcagttcgcgcagtaacgtcaccagcagatagcaaccgaggcggtcatcaaaggctttccccatcactcgctggtgagggagaacctgaaaagtggtatcaaacgtgacgcgatcgccgggacgaattcccgcctgcatcacttcgtcataggagcgcgcaccaatgtccacgcgcatggcgctgacgtcattcccctgccggtcgccgtcaagcaggcctggaattttgcactcttcacgggtggtgatgcgcaccggctgcagctggcgggcagccatgcgtacgttgccaaccggcagcacatcaatcgccccttcgcgggagatgctgcgcaccataaatcccacttcgtccatatgcgcacagatcatcaccttcggacctgtcgattcattcaggcggatcagcaccgatcccagaccatcaaatcgcacttctttttgcaggcgatccgcttcttccagcaggatctgccgcacttcctgttccgaggaggcgatcgcatctgcctcgctcaacgcttttaatagcgataaatccattatgcctctcccgtgagcaacactgttttcggcatggcgtagagcacttctgcgccttgcggggtaaccagcacaacatcttcgatgcgcacgcccccttgccctggcaaataaatccccggctccacggtcagtaacatgcctggctgtagcgtcgtggtgtcccgcggtgaaaaacgcggatcttcatgaacttcaatgccgatagcgtgaccggtgttatgaccgaaatagtcgccataacctgcttctgtaatgacccggcgcgcggcatcgtcaacctgctggcagcgcacgccggggcgaatcgcggagattgctgcgagctgtgcctgcaggacaatttgatagacgttaaacagcaggtgagattcggcgctcaccccttcgccattcaccagcaaggtgcgcgtcatatcagagcagtagccctgatacagcgcaccgaaatcgagagtgacaaactcgcccgctgcaacaatcttgtcgctggctttgccgtgcggcagcgccccacgccagccactggcgacaatggtgtcaaaagaggctttttctgcgccctgctggcgcataaaccactccagttcagcggctatctcgcgctcgctcatccccgcctgaataaagcggcgaatatgctctgcaccgcgatcagcaatcccacaggcgaggcggattttctccacctcctctggcgttttgatttgccgcagcacatccggcgtggcgctaaccagtttcgcattgagttcagactgccagcggtgcgcggtttcccaactcacctgctggccctcaaaaccgagcgtttgcaactgttcatcggcaatgatttgattgacgatagtggtaagcgtgttcgtcgcgtcaagcaaatgcagctggtagccttgcgcacgggcttccacctcaacgtaatagcgcgaatccaccagaatgtgcgcactttcacggctaatcaccacataacctgatccggtggagatccccagatgcggctgtttgttctgccgtgaggagagaagcactgcatccagttgttgcgccttaagccagtcgcgcagcgaagcgagtaatgtcatctggattttccttcttacaggctatcgattaacaatttgcctttacggaacatcatcagacgcaggaacaccaccatcagcgcagttatgactgcccccagcgcgatccccgccatatagacgcccaggttagtgaccagcggccatgcccagatagcggactccgggaaccattgcactgcgcccagccagacagcggcggttgagccgacaatagcgccgaccatatacgacggaatggcggtgatggggctttccagcgcaaacggaatcgcaccctcactgatccccataaacgccaggaacatggcggtcttaccctgcggataaagttgagcgttgaacaggcgtttgccggttaaacgacggtcgataatggtcgccagccccagaccaatcggcggaataacgatagcgatagaacgagcggtgaccggtaatacgtggtcagtggtaaagctgaaggcaacaaaacctgcggctttgttgatcgggccaccaaggtcgattgctgtcgccgcggcgatccccattgcgtacatcagcgcgcccttctcacctgcggcagtcagcacagtacggataccgccgttgatccagccaccaaagggggtgatgacgtagtacatcgccagcatgacaaaaatggcggaaagaatcgggagcaaaaatgtggttttgaacgctaacaggaaatccggtaactggattttctggttcatccacttcacaaggtaaccggcaacgatagaaataatcagcgcaccaatgaaggtggacggcaccggcgaagaggtcgcccattgcatagtgctgggatcgaagttcagcagttgcgtcggctgggtagacatcaacccgccgataaaaccagccgggaacgccagtttgccaccgatagagttcgccacaaaagcagcaaacatcggaatggcaaaaccaaacaacacgccgccgaaggactgcgacagccaggcaaatttaagtaaggagaggtcgaaaccggagaatttcccgctattaagagcatccatgatgccgatctcagcaggaattttaagccagctataagcaatcagctggctgaaagcgaggatcacaccgcccataattaaggtcggcaccatgcgtgaaatccctgacatcacatgctgcgggagttcaccccagaagctggttttagaggcctgcggattcttaactgccgctgccgcaccggatgcgccaggcacaacggttgcactgcgttttttaatggccataacaattatccctgtcgaatattactgttgttcagaggcaatcatctcttcgatttctttgatgatgcccgcagcgtttttaattgcgtcctgcaaagtgatttcataaacgtcgcgtgattcgaaacgttcgttatcttccggggtaactgccacggagtggatgatgatggtcgcttcggcgatatcctgcgccgtcaggcgattctggataccgtccgcgccctgggtttcaattttcacttcataaccggcttctaccgccgcttcttccagcgcctgagcggccataaaggtgtgagccaggcccatcgggcaggcacataaggcaatcagtttcttactcatcgttaattcctcgttcagtgatagttgacgagtgaaattatgaacgtgcaaaacaaatcgccgttaccagacaaataatgcatttactggagaattaatcccgctgtacggaagtgtgacgcaggtcgaccttgtgaggggacacaaagaaaaattgaataaactgtatgatttaaaagattatcgggagagttacctcccgatataaaaggaaggatttacagaatgtgacctaaggtctggcgtaaatgtgcaccggaaccgagaaggcccggattgtcatggacgatgagatacaccggaatatcatggacatattctttaaagcgccctttatcttcaaatgcggcacggaaaccggaggctttgaagaactcaaggaagcgcggcacgataccgcccgcaataaacacgccgccaaatgtcccgagattgagcgccagattgccgccaaaacggcccataatgacgcaaaacagcgacaatgcgcggcggcaatcggtgcagctgtcagccagcgcgcgttcggtaatatcttttggcttgagattttctggcaggcggttgtcagctttcacaattgcgcgatacaaattcaccagcccagggccagaaagcacgcgctccgccgaaacatgaccaatttccgcacgcaatatttcgaggataatggcctcttcttcactattcggcgcaaaatcaacgtgaccgccttcgcctggcaagcttacccaacgcttatcgacatggaccagatgcgcaaccccaagccccgttccggcaccgtaaaccgcaataggcttaccttcgaccggttctgcgccaccaaactgaatcagatgctcttttttcagcatcgggatcgccatcgatacagcggtaaaatcgttaataatttccagatggctaaaaccgagattctttttcatttcggcaattgagaacgcccaggtatggttggtcatcgccacccagtcaccggtaattgggcaagcgatggcaatacagccgtctttcacctcgaccttatgttcttcaagataaacgcgaatgaccgcttcgaggctggggtaatcaagccctgaataggtcttagcctgcgagatttcaccactggcaatatcacacagagcaagacgtgcgttggtgccgcccacatcaccgactaatgcatactttgtcattcttcaactgctccgctaaagtcaaaataattctttctcacactgtaaatacctgggggcataacaacaacgccggaaaggcaggctccctgtaaatatcgatctgggtcacacaattactttatcgtttcagcaccaattgcagcgatgcctttttgcaagctgggcaaactaagtatctgaccccgcataaggaatagaacatgctccatccgcgagccagaaccatgttgttattatcgctccccgccgtggcaattgggattgcgtccagtcttattctgattgtggtgatgaaaatcgcctcggtattacagaatttgctctggcaacgactgccgggaactctggggatagcccaggattcacccctctggatcatcggtgtattaacgctaacgggtattgcggtggggttggttatccgtttcagccagggtcatgccggaccagaccccgcctgtgaaccgctgatcggcgcaccggttccgccctctgcgctacctggacttatcgtagcattaattctcggtcttgctggcggcgtcagcctggggccggaacatccgatcatgaccgtcaatatcgcccttgcggttgccattggcgctcgtctgttaccgcgcgtcaaccgaatggagtggactattttagcctctgccggaaccatcggcgcactgtttggcactcctgttgcggcggcgttgatattttcgcaaaccttaaatggcagtagtgaagttccgctatgggatcgtctctttgcgccgttaatggcggcagcagctggtgcacttactaccggattatttttccatcctcatttttcactgcccattgctcattacggacagatggaaatgaccgatattctcagcggtgcaattgtcgcggcgattgccatcgcagcagggatggtcgccgtatggtgcttaccacggttgcacgcgatgatgcatcaaatgaaaaatccggtgctcgtgctgggtattggcggatttattctcggtattctgggggttattggtggaccagtttcgctgtttaaagggctggatgagatgcagcagatggtggcaaatcaggctttcagcaccagcgattactttttgctggcggtaattaaacttgccgccctggtcgttgctgccgccagtggctttcgcggtgggcgaatcttcccggcagtgtttgtcggcgtggcattagggttgatgctgcatgagcacgttcccgccgtaccagcggcaataaccgtttcttgcgctattctcggcatcgtgctggtggtaacacgcgatggctggttaagtctttttatggcggcagtcgttgtacccaataccacattgctaccgctgctctgtatcgtcatgcttccggcatggctgttattagcaggtaagccgatgatgatggtcaatcgtccgaagcaacagccaccccacgataacgtttagcaaaaaatgctctcctttatgatttaagagttatggcgatgatacggggctttacctccccgtaatattgcgttaacaggccgctgacggcttcgagcgtgaaggagaataacaatgttcaggtcactgtttctggcggccgccctgatggcatttaccccgcttgcagcaaacgcaggtgaaatcaccctactgccatcaatcaaattacaaattggcgatcgcgatcattacggtaattactgggacggtggtcactggcgcgaccgtgactactggcatcgcaattatgagtggcgcaaaaaccgttggtggcgtcatgataatggctaccaccgtggctgggataagcgtaaagcgtatgagcgtggctatcgtgaaggctggcgcgatcgtgacgatcatcgcggaaaaggccggggtcatgggcaccgccattaaacgcgtccgccaatggagcacaatgcctgatgcgacgctagtgcgtcttatcaggcctacaaaccggctctttaacgcgtagggcggataaggcgtttacgccgcatccgccaatagtgccagatgcgacgctcattcaactacaatcccagcgccgtccccaccaacaaccagatattcagcgccacgaccagcaccacaatcacccagcctgtctgttttacgcgtttgctgttcaccagatcgcccatcaacttgctgtcactggtgaaaatcagcagtggaaccagcgccagagcgataccaaaacttaacagtacctgactcataaccagaatccgtgtcggatctaatcccatcagaatgacaataaatgacggcaacatggtgactgtacgacgcacccacagcgggatatgaaagcgaatgaagccctgcatcaccacctgccccgccagtgtccccaccaccgttgaagacagccccgcagcaaccaggcttaatccaaagaccgttgccgcagcgtggcttaacagcggttgcagcgtcagataagcctcatcaagatcggcaacaccagtatgaccggaaaagtggaacgccgccgcagctgtagccatcatcgccagattgacaaaaccggcaatagtcatggcgatagccacatcccatttggtggcggaataacgttgttgacgcgaaccgccatgtaaatgctgagtgagcgaggagtgcaaataaatcacatgcggcataatcgtcgcccctaacacgcctgctgccaggaagaccgcttccgaagtaggtaaactcgggatcaccattcctttacccagctgcgccaggttaggctgggagaaaatcaactcgacaatgtaagccgcggcaacaaacaacagtaacccgccaatcactttctccagcggtttttgcccgcgacgttgcagcattaaaatcaggaaagtcgcgatccccgtcagcaccgcgccctgcaacaacgaaacaccaagaatgagtttaaaaccgatcgccgcaccaataaattccgccaggtcggttgccatcgcaataatttctgcctgaacccaatagaaccacactacgggacgcggatagtgatcgcgaatctgctccgccagatttttaccggtggcaatccctagtttggcagagaggatctgaatcagcatcgccatcaggttggcccaaacgacaacccacagtagctgatagccgaagctagcacccgcctgaatattggtcgcaaagttaccgggatcgatataaccaatcgccgcaatgaacgcaggtcccattaatgcgagcctcatcttgcgcgccgcccgtccgctgctactctcaacgcgatagttcgtcatcttgtgcctctaaaacatagcctttgctatgtttcatgctatgccaaacgagaatgattatcaaattcatttaaatggattgtggtgatttctctgatagaccaggattatgactacgaaaagattgatgacttgaatgttatggttatgtttaatgttagcacatttacataactttcagcttccatacacaacatagcagaaatgtatgacagatcactatttttgaagcctgtcacaggacgtcattatagtgtgtgtcagatctcgttttccttaaccatgttacatagaatgtgcacggaaatttaacctgcctcatatttggagcaaatatggaccgcgtccttcattttgtactggcacttgccgttgttgcgattctcgcactgctggtaagcagcgaccgcaaaaaaattcgtatccgttatgttattcaactgcttgttatcgaagtgttactggcgtggttcttcctgaactccgacgttggtttaggcttcgtgaaaggcttctccgaaatgttcgaaaaactgctcggatttgccaacgaagggactaacttcgtctttggtagcatgaatgatcaaggcctggcattcttcttcctgaaagtgctgtgcccaatcgtctttatctctgcactgatcggtattctccagcacattcgcgtgttgccggtgatcatccgcgcaattggtttcctgctctccaaagtcaacggcatgggcaaactggaatcctttaacgccgtcagctccctgattctgggtcagtctgaaaactttattgcctataaagatatcctcggcaaaatctcccgtaatcgtatgtacaccatggctgccacggcaatgtccaccgtgtcgatgtccatcgttggtgcatacatgaccatgctggaaccgaaatacgtcgttgctgcgctggtactgaacatgttcagcacctttatcgtgctgtcgctgatcaatccttaccgtgttgatgccagtgaagaaaacatccagatgtccaacctgcacgaaggtcagagcttcttcgaaatgctgggtgaatacattctggcaggtttcaaagttgccattatcgttgccgcgatgctgattggctttatcgccctgatcgccgcgctgaacgcactgtttgccaccgttactggctggtttggctacagcatctccttccagggcatcctgggctacatcttctatccgattgcatgggtgatgggtgttccttccagtgaagcactgcaagtgggcagtatcatggcgaccaaactggtttccaacgagttcgttgcgatgatggatctgcagaaaattgcttccacgctctctccgcgtgctgaaggcatcatctctgtgttcctggtttccttcgctaacttctcttcaatcgggattatcgcaggtgcagttaaaggcctgaatgaagagcaaggtaacgtggtttctcgcttcggtctgaagctggtttacggctctaccctggtgagtgtgctgtctgcgtcaatcgcagcactggtgctgtaagaccatacataaaaaagccggggataattcccataagcgctaacttaagggttgtggtattacgcctgatatgatttaacgtgccgatgaattactctcacgataactggtcagcaattctggcccatattggtaagcccgaagaactggatacttcggcacgtaatgccggggctctaacccgccgccgcgaaattcgtgatgctgcaactctgctacgtctggggctggcttacggccccggggggatgtcattacgtgaagtcactgcatgggctcagctccatgacgttgcaacattatctgacgtggctctcctgaagcggctgcggaatgccgccgactggtttggcatacttgccgcacaaacacttgctgtacgcgccgcagttacgggttgtacaagcggaaagagattgcgtcttgtcgatggaacagcaatcagtgcgcccgggggcggcagcgctgaatggcgactacatatgggatatgatcctcatacctgtcagttcactgattttgagctaaccgacagcagagacgctgaacggctggaccgatttgcgcaaacggcagacgagatacgcattgctgaccggggattcggttcgcgtcccgaatgtatccgctcacttgcttttggagaagctgattatatcgtccgggttcactggcgaggattgcgctggttaactgcagaaggaatgcgctttgacatgatgggttttctgcgcgggctggattgcggtaagaacggtgaaaccactgtaatgataggcaattcaggtaataaaaaagccggagctccctttccggcacgtctcattgccgtatcacttcctcccgaaaaagcattaatcagtaaaacccgactgctcagcgagaatcgtcgaaaaggacgagtagttcaggcggaaacgctggaagcagcgggccatgtgctattgctaacatcattaccggaagatgaatattcagcagagcaagtggctgattgttaccgtctgcgatggcaaattgaactggcttttaagcggctcaaaagtttgctgcacctggatgctttgcgtgcaaaggaacctgaactcgcgaaagcgtggatatttgctaatctactcgccgcatttttaattgacgacataatccagccatcgctggatttcccccccagaagtgccggatccgaaaagaagaactaactcgttgtggagaataacaaaaatggtcatctggagcttacaggtggccattcgtgggacagtatccctgacagcctacaaaacgcaattgaagaacgcgaggcatcgtcttaacgaggcaccgaggcgtcgcattcttcagatggttcaacccttaagttagcgcttatgggataattccccggtttttttacgcctgttaatcagctaatggctgcgggcgaccaatcaaatacccttgcagatattgcaccccgagcttatgcaatagcgcctgctgctgttgcgtctcgacaaactccgcgaccacactcaatgacttcgctttcgccagatcggtaattgatctcacaatcatcgcatccagcgtgttcgtgacaatatctttcacaaagacgccatcaattttgatgatatcagcctgcaaacgctttaaccgttcgtagttggcatatccggtgccaaagtcatcaatcgcaatccggaaaccaaacttatgcagctgctcgatgttgtacatgctgctttctgcgttagaaaacgcctgctcctcggtgatctcaagaatgaccgcctgcggggagatgtgataacgcttaaacagacgaataatccgcccggcaatattcttttgcagcagcgtgagcggcattaaattgactgaaaagcgcggtccttttttgtcgcaagggtgtgttgccagccacttcaacaaggattccagcacttgcaaatcaaaacgcgcgctaaggttaaactgagcaataaggggcagaaacttatccggggtcataatgccgccgtcatatttcagtcgcgcgaggatctcatcataaccttcaccctctttgttgcgaattggctgggcgtagagcagcaaatcaccctgatctaacgccgtgcgaatggtattcagcaatagcacctgtttagtggtctgcccggaaaccatctcctctctgctatccagcgccagcacatgatgatgtgcgcaggattgctccgccagccagcttaactgccccaacaagggttgcagggtttcctgatttccatcaaaacgcccccaggcagcaccatagcccatatccagcccggtattgttccagtgaatttgccgactattcaggatgttaaccatatgctggagtcgcccttccgtttccggcccgctcagcactaacagcagttcactacccggcaattgatacaacttttcgttttcctgcatcaacggcagcagcgtacggcaaattgagcggatacagtgaacgcgcatcattaagccgtaatgacgactcataaactcaagattatcaatgcgcaggcagcaaaaactcttgcccgcctcttgctccggcgcttgttccaacgcacgaaagttgggtaggagcgttaacggatctgtcagcgcctgcaaatgccagcggcgattaagccattcactgcgatgataaatgcgcaccatatagagcaggcaaacgctaaaggaaatcagcaccgcaagaataaatgccagcgaatattcggtttccaccccttgcaaaaagttctggttgtaattcagaaggcaaagcgttgaaacagcccaggtgagatttaaaaacggatagcgaagcttaccgaccccgagggtaaagatgatgaagaaaacgggtaccaggtaaccggcaataaagtcgttttcataaggtgtgcacaacagaagtagcagcacgcttaacgctgccagccagcttaaggtaaatgcgcgtttctctttgcccaacgacggagcgatatccctgcgccacaatatctgcgcaaagtggggacttacaatcatgcgagtgagatagtagaaaagcatgttgtaaatcagcacagcggtgaaaaggcttagcaaatcaacgaccgtgaaaatggcatccgcatcgccgaaaaaggtggatatctttagcgggaaatcaaagaagctccccacaagatacatgctgcatttgatgccgatcggcgtcaccaaaccaagccagaacagacgttgccagacatatcggctggtcaatccataacgccaacgcgtccccagctgccagcgtaatattgcgcaggcacacaacacgacaaacgtctggctaccgagcatgaccgcagtctgtaaaaaagagagatgaaagttccacagattggtgcaaaacatcccgcataaaacgggaacgacaccgcgccagccaaagataaacaagattgacagcattacgcacagtggcatccacgccagaaagatataactggaatggataatggcaagtggcgaaataaaacgggatagctgaataagtaccacggtgagcgtaaacgctagtgtgaatatcttgatattttttatcaggttatgctccacaaacatgagtacactactctcactgatcggggttttcaggcacacaaataataagtttattcgcatcgcgaagcaaacagggggccagcctgttgccgatttttcatccaatgatgctttcaccaggcggcactaacccggacgtagactgtattacaaaagcggcaaaaagcagagacaaaaaacccccgctttgcagcgagggttggaaatttggtggagctaagcgggatcgaaccgctgacctcttgcatgccatgcaagcgctctcccagctgagctatagccccacgatgcgtttacgtaccaagtttgctgggtgcaaaatttggtggagctaagcgggatcgaaccgctgacctcttgcatgccatgcaagcgctctcccagctgagctatagccccgtcacgtaaagcttgtcgagttgacgggcggcatcatatgaattccgcccgaatgtgtcaacggcaaattgcaacgtgtagtttcaatcgctgaaaaatcaggcaaatgaacaattttggaaaaccgctcgcattcagtagttattcatgtcacggtttcctgtaaagtggtgttataaaatgaactactaatagacccacatacattcagggaattgttatgttcaaggagaggatgacaccagatgaacttgccagactgaccggctatagccgccagaccattaataaatgggtacgcaaggaaggctggacaacgtcaccaaaacctggcgtccagggtggcaaagcccgactggttcacgtcaatgaacaggttcgtgaatatattcgcaatgctgaacgtccagaaggtcagggagaagcgcctgccctttctggtgatgcgccgcttgaagtattgctggtgacactggcgaaagagatgacgccagttgaacaaaaacagtttacatccttgcttctgcgggaagggattatcggattgttacaacgcttagggattcgcgatagcaaataatatgaaaagattacgcaataaaatgaccaccgaagaactggctgaatgcctcggtgtggctaaacaaactgttaaccgttggatcagagaaaaaggctggaaaacggaaaaatttcccggcgtgaaaggcggtcgtgccagacttattctggtcgatacgcaagtttgcgagtttattcagaacacgccagccttccataacacaccaatgttgatggaagctgaagagagaattgctgaatacgctcctggagcacgcgccccggcgtatcgacaaatcatcaacgcgatagataatatgacagacattgagcaggaaaaagtcgcgcaatttttgtcacgtgaaggaattcgcaatttcctcgcccgtctcgatattgacgaatcagcataaataaaaaacggcaggatattatctcctgccgtttatctttttacacgctaattactgctgattttcgcgttcagcaataaaatccagcgctttgttgatacgctcgatactgcgggtcttaccaattgcgtgaacggtaacatccagtgctggagactgccccgcaccggttacggcgacacgcagcggcataccaactttacccatacccacttccagctcatccgccgtcgcctgaatagcgtgatgaacgttttcagcggtccagtcagtaatcgcggccagtttgtcacgaaccacttccagcggctgacgcgctaccggacgcagatgttttttcgcggcgtcggcatcgaactcagcaaaatcttcgtagaaataacggcagctctgtgccatctctttcagcgtcttgcagcgttcgcccagcagtttcaccagatcagccagctgcgggccgttacgggtatcgatattttcctgctcaatgtgccactgtaagtgagtagcaacatactccggcggcagcgcgttaatgtagtgatggttcagccacagcagcttgtcggtgttgaacgcactggcagatttgctgacggcattcaaagtgaagtatttgatcatctcttcacgagtgaagatttcctgatcgccgtgggaccagcccagacgcaccagatagttcagcagtgcttctggcaaataaccgtcatcacgatactgcattacgctgactgccccgtgacgtttggacagttttttaccgtcatcgccattgatcatagaaacgtgcgcgtaaaccggcaccggcgctttcagggccttaagaatgttgatctggcgtggcgtgttgttgatatggtcttcgccacggataacgtgggtgatttccatatcccagtcatcgacaaccacacagaagttataggttggggaaccatcggtacggcggataataagatcgtccagttcctggttgctgaactcgatcggaccacggatctgatcgtcaaaaacaacagaaccttcctgcgggttagcaaaacgtacaacacacggttcatcatcagcatgatgctcatggctgtggcggcagcgaccgtcataacgcggcttctcacctttcgccatttgctcttcgcgcagcgcttccaggcgctctttagagcaatagcatttataagcagtgccctcttccagcatctgatcgatcaccgcgttgtagcgatcaaaacgtttggtctggtagtacggaccttcatcccactccaggctcagccagttcatgccatccataatggcttcgatagcttccggcgtggaacgctcaagatcggtgtcttcaatacgcagcacgaactcaccgccgtggttacgtgcaaaaagccaggagtaaagagcagtacgcgcgccgccaacgtgcagatagcctgttgggcttggcgcgaagcgagttttgattttcatgaaatggccttacgtttagaaagatgccgacaaccggcaaatcctggaaaaattaagtgggcgatattctatcactcccgcctgattcctcaatgtagttcgggtttctaccttacgcattattgttttcgttgacaaattgcgcaacacggtctgttttgcgatcatcttgcttaaatttacgacgaacgaacaatttctttagaaaatgcgttgactcattttgaactctccctataatgcgactccacacagcgggggtgattagctcagctgggagagcacctcccttacaaggagggggtcggcggttcgatcccgtcatcacccaccactttctcgccagctaaatttcttgtaaaaatgtgaagtaccgaagtgggtgattagctcagctgggagagcacctcccttacaaggagggggtcggcggttcgatcccgtcatcacccaccacttcgggtcgttagctcagttggtagagcagttgacttttaatcaattggtcgcaggttcgaatcctgcacgacccaccaatgtaaaaaagcgccctaaaggcgcttttttactatctgcgatactcaaagattcgaacctgcagcaggtttgagttgagcgcagcgaaacaacggagccgctcgcggcgacggcccgaagggcgagcgaagcgagtcatcctgcacgacccaccaatgtaaaaaagcgccctaaaggcgcttttttgctatctgcgatttgcgaaattgcctgatgcgcttcacttagcagactactatttccggcaattcctgtctcctcacctactgtgtcaatgcagccaacagcttaaccatcgcgggcgtcacctgctgtgtttcataaacaatatataaatctgcagggatgcgctgtttgagcggacggaaaatgacacctggccagttcatttgtgcgtagctgtccgctatcaatgtgataccaatgcccatactgaccatagcgagtaccgtttgcggttcattaacttcgcgaataacaaccggtgaaaatcccacctgctggcaaactcgctgcaaaaaatcccagtcagtgtaaacgggcggcattgtaacaaaatactcgtcacgtagcgcttccagcgggacggtggaaaatgatgagagatgatgctcttcaggcatcgccaccagaaacgccgattcatgcaaccgtaagctggtaaaaccagtcggtggttctgtcgccattcgccagatcccggcatcaagttcgcggcgttccagcaaggccatttgcatcgcgggcatcttttcgcgaaaaagaacgtcaacgttaggattttccctgaggaatcgccgcataaccgggcgcatccgtccccacattgccgttcccactacgccgagttcaatccgccctgcttctccccgacctatttgttcaatccgagccaatacattattagcattcaccagcaatcgacgcgattcttccatcaagattttgcccgcgtgtgtcagtacgacgctgcgcgaatggcgaataaaaagctgcgtgccgagttgattttccagctctttaatatgaatgctgagcggaggctgagacatatttaaacgcgctgctgcgcggccaaaatgcaactcttccgctacggcaagaaaataacggagcaacttaagatctgttctgtatacgcgttccataattaagtgctccatataataaatacatcgtattaaattatcatggcataaagtatttcaccaccagatatccgacatacataaacacaatggataatatacccggtaatacatttggtacaggaataggcaagcgcacgattgtaaacaaagcaccaataccaaaaccaacgccggaagaaaataaaatatctttcactaattaacctttatcataaaagcagctctgaagagcagagccgcgaatccttttaatgagtcaccgctcgatgctttatcttttcagggtcatgattatatttaaacccaaagaaaaatatcactgcgagaaaaagagcatatcctgcaaacaccagccagatagtttgccagtcttttacgccatccaccgaaaagtaatctactgccatgccactcagaatcgagccaacccatgcgccgacaccatttaccatggtcataaagagcccctgcgcgctggcacgaatgctggaatcaacttcctgttcgacaaataccgaaccagaaatattgaagaaatcgaatgcacagccataaacaatcatcgacagcagcagcaaaataaatccggttgttgacggatcgccataggcgaagaagccaaagcgcagcgtccaggccaccatactcatcagcatgacggttttaatgccaaatcgctttaaaaagaatgggatagtcagtataaagcccacttctgccatctgtgaaactgacagtaaaatggagggatatttcaccacaaaactgtcagcaaactccgggttacgggcgaaatcatgtaggaacggattaccaaaaacgttggtaatttgcagtaccgcacccagcatcatggcaaagaggaaaaagatggccatgcgtggatttttaaacagcacgaaggcatccagacccagcttgctggcaagcgatgtggtcgcttttttctccgcaaccggaatcttcggcaaagtcagcgcataagccgacagcagcaatgacgcaccggacgcgatatacagctgcagactactcaattccagatgcagcaggcttactgcccacatcgcgacaatgaaccccaccgtaccaaaaacgcgaatgggcgggaaagcggtcaccgggtcaagccctgcctgggcaagacaggaataagagacgctgttcgataacgcaatagtcggcataaacgccatcgcattgactaacatcacccaaaacatcatatccggatcagttacggatgccgcataaaaaagtacgcccgcacacaccaggtgacacagcatgtatgcacgttctgcgcgcagccatttgtctgcgatgatccccattataccaggcataataatcgcggcgatccctttggaactgtaaaccatgccaacattagcgccggtgaaatgaagagtattaatcatgtaagagccgagggtaaccagccagctcccccagataaaatattgcaaaaaggacattacctttaagcgcatcgcgatgctcataatcgtttccttgtcgcatcatttggcctcacccgcgaggccgtttcttattgtttttctcaggcaattttgcgcagaaagccacaaataaggttgatgaagttctgcttagagagctccgcagccgccagcgtttgcgcatgtgacaatttcacatcgcttaaaccttccgccatattggtaatcgcagagaccgcaacgactttaaggtcgcaatggcgagctgaaataacctcaggcaccacagacataccaacaacatccccaccaataatttgcatcatgcgaatttccgccgcagtctcgaaattcggccccggatacgagacgaacacgccctccgtcagagggaaaccctcttctttcgccactttttgtaacagtgcgcggtattccgcatcgtaggcatttgccagtgagaagaagcgctctccaaaacgatcatcgttaagacccaccatcggcgtaccgggcatggtgttgatatgatctttcaatgcgaccaggctgcctgcccccacttccggacgcagcgagcctgccgcattggtgcagaacagtagctcgcagcccagcagcttaaaggtacgaattgcgtcagtcataatggtcattccacgaccttcgtagaaatgtccgcgacctttcatacataccaccggtacgccctggagatggcccagcactaactcccccgcatgaccatgtaccgtacttaccgggaagcccggcagcttttcgtaggaaattgcgacagcgttctcaatctgatcggccagcgcgccgagcccggaacctaaaataaaggccactcgtggcgtgaaatcaggtttataagtcttgataatatctatgcaaaacagcgggttatgagaaaattgaacctgagacatacatatcctttttctgtagggtggaatctaacgcctttttatagcgaggttgtcccggctcttaccaatacacttttctcacgcattcaatagcgattcgatatcgatggatttatatcttttctctattaatccacggtaaaaactgtattggcgatattaattcctttgcattaacaatatgtcgtttttagcaaaccactttattaagcaatctactaataacgatcggcatagggaattatgctatgaaaaaacatcttttaactctgacactttcctctatattagcgatacctgttgtatctcatgcagaatttaaaggcggttttgcagatatcggcgtgcattatctggactggaccagccggactaccgaaaaatcgtcgaccaaatcacacaaagatgattttggttatcttgaatttgaaggtggcgctaactttagttggggagaaatgtacgggttcttcgactgggaaaacttctataacggtcgccataataaaccaggtagcgagcagcgttatacctttaaaaataccaaccgtatttacctgggtgacaccggatttaatctctacttgcatgcgtatggcacctacggttctgcgaatcgcgtgaatttccacgacgatatgttcctgtacggtatcggctacaatttcaccggcagcggttggtggttcaaaccgttctttgctaagcgttatacagatcaaacctattacactggcgacaacggctatgtcgccggctgggttgcaggttacaactttatgctgggcagcgagaaattcactcttaccaactggaacgagtacgagtttgaccgtgacgctacctatgcagcgggtaatggcggtaaagaagggctgaatggcgcagttgcactgtggtggaatgcaacatcacacattactacggggattcagtatcgatatgcggatgacaaactgggcgaagatttttaccaggatgcgataatctactccatcaaatttaacttctgattgattactgccggggctcccggcagtatgaattcactctatatctgatacaacggatccccttcccgcccagccattagcgcattgccctggtctcgtaccacgtcccataaagcttcagcggcggtggaaagtgaacggttcttcctgcgcaccagcatcaactggcgttcaacaaccggcgtaatgcgctttaccaccagtgggctaccttcaggcaatggtagcgccagtgcgggaagaatactgatgccgatgcctgcggctaccatcgggaacagcgtcgccggatgtccaatctcctgcacaatattcgcctgaataccattgcgcgccagcgctgcgtcaatcagcggtcggctgcctgacgcgtaatcctgcaacaccaatttcgctccctgtaatgcctgccagggtacataatcttccacggccaaagcgctatcgcgatggcaaagcagaaagaaaggctcggaaagaatcgcttcacattgcagatcgcccactgggcctggatcgatgacgatgccaaaatcgacatctccctggcgaatactttccattacccactgctgcggacgatcgtgcaggacaaactgaatatctggatagcggcgatggctttcagcaatgcattgcggaataagatgcgcggaaatggtctggctggcagcgacccgaacttttccgctcagttgttgccccatacgcccggtatcgcgcaacgtgctgttcagttcatccagcagtcgctcaagacgcaaagccagctgctgccctgcatctgtaagcaccacttcacgcgtggttctgtccagcaggcgaacaccagtatgattttccagttccttcacactgtgactcactgccgactggctcaggccgatacgctctcctgcacgactaaaacttttctcctgcgctactgtgacgaaaacctttaattgttttaaagaataattcatctgttttcttcatgaatggatgcaataaatcaattttatttctcaaactggaagaagcacaatagaaccatcgatcatctggagtctttatgaaactttttcgtatcctcgatcctttcaccttaaccctgatcacggtggtgttgctggcctctttctttccggccagaggcgatttcgtccccttctttgaaaatctgaccaccgcagctattgccctgctgttctttatgcacggcgcgaagttgtcgcgtgaggcgattattgctggcggtggtcactggcgactgcatttgtgggtaatgtgcagcaccttcgtgctgtttccgattctgggtgtactgtttgcctggtggaaaccggtaaatgtcgacccgatgctctactccggttttctctacttgtgcattctcccggctaccgtgcagtctgcaatcgccttcacgtcaatggcgggcggtaacgtcgcggcagcggtttgttctgcgtcggcatccagcctgctggggattttcctttcaccattgctggttggtctggtgatgaatgttcacggtgcagggggcagccttgagcaggtcggtaaaattatgctgcaactgctgctgccgtttgtgttggggcatctttcccggccgtggattggtgactgggtgtcgcgcaataaaaaatggattgcgaaaactgaccagacgtccattctgttggtggtttatacagcgttcagcgaagccgtcgttaatggtatctggcataaagttggctggggatcattgctgtttatcgtggtggtcagctgcgttcttctggctatcgtgattgtagttaacgtctttatggcacgccgactgagcttcaataaggcagatgaaattactatcgtcttttgtggttcgaaaaagagtctggcaaatggcatcccgatggcaaacattctgttccccacatcggtgatcggtatgatggtgctgcccctgatgattttccatcagatccaattgatggtctgtgcggtgctggcgcgtcgatacaaacgccagaccgaacagttacaggcgcagcaggaaagcagcgccgataaagcttaaagcggacgcttcaggggctggaccagttgcgtcagcccctcggttttaatcagcagcgtgatttgcattagctcaccgagcttccctgccgggaactcatctttgcgggcaaaccacagcagatactcctccggcaggtcgattaagcgacgccctttgtatttgccaaacggcattatcgtattggctatttcaatcagctgctctttttccatctcagctacccagcaaacgcagcatttccgcttcgtcgatgacttcaatgcccagttcctgcgccttcgccagtttagatcctgcagcttcacccgctatcaccagatcggttttcttcgacacgctgcccgcgactttcgcgcccagttcgaccagtcgagctttagcgtcatcacgcgacatctggcttaagctgcccgtaagcaccacggttttaccagcaaacgggctgtcaatctcttccgcgttgataacgatcggcgcaggccagtgaacaccttccgccaacagctcgctgatgacattgcggttgctttcttcggcaaagaagttgtgaacgtgggatgcaacgacaatgccaacatcaggcaccttttgcagctcttcaatcgaagcggcttccagcgcttccagcgtgccgaaatatgccgccagacctgctgcggtggcctcgccgacttcacggatgccaagtgcatagaggaagcgagcaaaggtggtttctttcgctttttccagcgcgttaaccacgttttgtgccgattttggccccatacgctccagtccggtcagtttgcctgcggtgagtttgaacagatctgccggagtatggacatattctttttcaaccagctgatcgatgattttgtcgcccattccgtcaacatccatcgcacggcgggaaacaaagtgtttcagcgactctttacgctgcgcaccgcaaatcaggccaccggtacagcgggcaaccgcttcaccttccacacgctcaacgtcagaaccacataccggacaatgcgtcgggaatacaacctcacgggtatcttccgggcgttcagaaagcacgacgttaaccacctgcgggatcacgtcgccagcgcggcgaatcaccactttatcgccaatgcgtaaaccaagacgttcgatttcatccgcattgtgtaaggttgcgttactcaccagcacgcctgcaacatggacaggttccagacgcgcaacaggcgtaatcgcgccagtacgcccaacctgaaactcgacgtcacgcacaaaggtcatctgctcctgcgccgggaatttaaacgctaccgcccagcgcggggcacgcgcgacaaagccaagctgctcctgctgtgccagtgagttgaccttaatcaccacgccgtcgatatcaaagcccagcgtcgggcggtcttcttccactttgtgatagaacgccagcacttcttccgccgattcacaaagcgttacccgatcgctgaccggcaacccccactttttaaattgcagtaaacggccaagatgagtatccggcagctcgccaccttccagaacaccaacgccatagcagaaaaaagtgagcggtcgcttcgctgtaatacgcggatcaagctgacgcagtgaaccagctgccgcattacgtgggttagcaaacactttcccgcccgtgcgtcgcgcatcttcgttaatcttttcgaaccccgcctgcggcaggaacacttcaccacgcacttccagacgcgccgggatattctctccgtgcagcttcagcggaatggcgcgaatagtacgcacattagacgtgatatcttccccggtggtgccatcgccacgggtcgcggcactgactaaaacgccattttcatacagaatactgacggcaagaccatccagcttcagctcacagcaccaggtgactttctcgttgtttttcagacggtcctgcacacgtttgttgaaagcaagaaagctttcttcatcaaaaacgttatccagtgacagcattggtacttcatggcgtatctggctgaaagccgccagcggcgcagcgcctacacgttgagtaggcgaatcaggcgtaatcagttctggatgtttggtttccagctcgcgcagttcgcgcatcagcctgtcgtattcagcgtcgggaatttccggcgcatccatcacatgataaagatattcatgatggcgaagcgtcgttcgcagttctgtcagttgttgttcgattgattccatatcgcaccatcaatgctaaaaacccccgacaagcgggggttcgaagaggagttaatttgccttaagtgtatcaggcgttggcgtctttgacttcgcggatgatgtcctggtactcgcgcaatttctgcggagtcatcatacggcgctgatcgtcaagcacgacaccgcccacttcatcggcaatatgctgcgcagattgcagcatcagcttgaagttctgcagctcgtcaccgtaagacggtacctgcataaagatagtgacacccggagtagtgaaatccttcatttcaggatcaaaggttcccggtttcaccatattcgccaggctgaataacgccgggccgctgccatccgggctaagatgacgatggtaaatattcatatcgccaaaaatgaagcccgcttgttgaatgctgttaagaagcagttcaccgtttagctcgctaccgtgatgcgccgcgacgttcatgataatcaccgcttctttgcgcttcggtttatccataactggagcaggttccgctacaggctcaggctgtggtgccgctacgggttctgcaggctggaaagcctgttgtgccggttgcggtgctgaatgcacaggctgcggcgctggcgcgacctgtggcgaaactggctgctgcaacggctgttcaggctgcggctgataggcaggctgctgcaccggctgcgctggatgcggagcatgttgcggcggtacctgcgcttcaggcggctgctggaccggttgacgcggctgcgcagacgcataaggcggttggtactggtgttgcggcgacggacgagcagcctcatgctcctgagcgttagccggggcatgattcacgcggtgaacacgaacctcaccaacgccctcatcatcttcgacatcctcgtcataagaatcgtcgtcacgttttgacttcattcgttttaatggccgatcgcggaacatagaagatcgttctttacggctggtccagaaaccatgtaccagtaaagcgattatggcgatcgcgccaacaatgattaatatcagacgcaaatcctgcatcattatattctctgttgttctaacaccttgccaccacggcaaacatttactcactaagagtatttgccgattacctcaagtgcaagtgcactattaactttcacagcacaaagatagatgaaatcgtgctttttgctgttttttcgaacatatcctaactgtccattgcgcaattacccggtaaaatacgcagaattttcctgggattggtcaaaaggagctcatcctgattatggtttcatcattcacatctgccccacgcagcggtttttactattttgcgcaaggctggaagctcgtctcgcaacctgggattcggcgtttcgttattttaccgctgctggtcaatattttgttgatggggggcgcattctggtggctctttacacagctcgatgtctggatcccgactctcatgagttacgttccggactggctacaatggctgagttatctgttgtggcctctggctgtcatctctgtgctgttagtgtttggctatttcttctccacgattgctaactggattgccgctccgtttaacggtttattggctgaacaactggaagcacgattgactggcgctacaccgccagataccgggattttcggtatcatgaaagatgtgccgcgaatcatgaaacgcgaatggcaaaaatttgcctggtatctgccgcgcgcaattgtattactaattctttacttcatccctggtattgggcaaaccgtcgcgccggtactgtggttcctgtttagcgcctggatgttagccatccagtattgcgattaccccttcgataaccacaaagtgccgtttaaagagatgcgcaccgccctgcgcacacgcaaaatcaccaatatgcagtttggtgctttaaccagcctgtttacgatgatcccgctgcttaatctgttcatcatgcccgttgccgtttgtggcgcgacggcgatgtgggtcgattgctatcgcgataaacacgcgatgtggcggtaacaatctaccggttattttgttaaccgtttgtgtgaaacaggggtggcttatgccgccccttattccatcttgcatgtcattatttcccttctgtatatagatatgctaaatccttacttccgcatattctctgagcgggtatgctacctgttgtatcccaatttcatacagttaaggacaggccatgagtaagatttttgaagataactcgctgactatcggtcacacgccgctggttcgcctgaatcgcatcggtaacggacgcattctggcgaaggtggaatctcgtaaccccagcttcagcgttaagtgccgtatcggtgccaacatgatttgggatgccgaaaagcgcggcgtgctgaaaccaggcgttgaactggttgaaccgaccagcggtaataccgggattgcactggcctatgtagctgccgctcgcggttacaaactcaccctgaccatgccagaaaccatgagtattgaacgccgcaagctgctgaaagcgttaggtgcaaacctggtgctgacggaaggtgctaaaggcatgaaaggcgcaatccaaaaagcagaagaaattgtcgccagcaatccagagaaatacctgctgctgcaacaattcagcaatccggcaaaccctgaaattcacgaaaagaccaccggtccggagatatgggaagataccgacggtcaggttgatgtatttattgctggcgttgggactggcggtacgctgactggcgtcagccgctacattaaaggcaccaaaggcaagaccgatcttatctctgtcgccgttgagccaaccgattctccagttatcgcccaggcgctggcaggtgaagagattaaacctggcccgcataaaattcagggtattggcgctggttttatcccggctaacctcgatctcaagctggtcgataaagtcattggcatcaccaatgaagaagcgatttctaccgcgcgtcgtctgatggaagaagaaggtattcttgcaggtatctcttctggagcagctgttgccgcggcgttgaaactacaagaagatgaaagctttaccaacaagaatattgtggttattctaccatcatcgggtgagcgttatttaagcaccgcattgtttgccgatctcttcactgagaaagaattgcaacagtaatgccagcttgttaaaaatgcgtaaaaaagcacctttttaggtgcttttttgtggcctgcttcaaactttcgcccctcctggcattgattcagcctgtcggaactggtatttaaccagactaattattttgatgcgcgaaattaatcgttacaggaaaagccaaagctgaatcgattttatgatttggttcaattcttcctttagcggcataatgtttaatgacgtacgaaacgtcagcggtcaacacccgccagcaatggactgtattgcgctcttcgtgcgtcgcgtctgttaaaaactggcgctaacaatacaggctaaagtcgaaccgccaggctagactttagttccacaacactaaacctataagttggggaaatacaatgttccagcaagaagttaccattaccgctccgaacggtctgcacacccgccctgctgcccagtttgtaaaagaagctaagggcttcacttctgaaattactgtgacttccaacggcaaaagcgccagcgcgaaaagcctgtttaaactgcagactctgggcctgactcaaggtaccgttgtgactatctccgcagaaggcgaagacgagcagaaagcggttgaacatctggttaaactgatggcggaactcgagtaatttcccgggttcttttaaaaatcagtcacaagtaaggtagggttatgatttcaggcattttagcatccccgggtatcgctttcggtaaagctctgcttctgaaagaagacgaaattgtcattgaccggaaaaaaatttctgccgaccaggttgatcaggaagttgaacgttttctgagcggtcgtgccaaggcatcagcccagctggaaacgatcaaaacgaaagctggtgaaacgttcggtgaagaaaaagaagccatctttgaagggcatattatgctgctcgaagatgaggagctggagcaggaaatcatagccctgattaaagataagcacatgacagctgacgcagctgctcatgaagttatcgaaggtcaggcttctgccctggaagagctggatgatgaatacctgaaagaacgtgcggctgacgtacgtgatatcggtaagcgcctgctgcgcaacatcctgggcctgaagattatcgacctgagcgccattcaggatgaagtcattctggttgccgctgacctgacgccgtccgaaaccgcacagctgaacctgaagaaggtgctgggtttcatcaccgacgcgggtggccgtacttcccacacctctatcatggcgcgttctctggaactacctgctatcgtgggtaccggtagcgtcacctctcaggtgaaaaatgacgactatctgattctggatgccgtaaataatcaggtttacgtcaatccaaccaacgaagttattgataaaatgcgcgctgttcaggagcaagtggcttctgaaaaagcagagcttgctaaactgaaagatctgccagctattacgctggacggtcaccaggtagaagtatgcgctaacattggtacggttcgtgacgttgaaggtgcagagcgtaacggcgctgaaggcgttggtctgtatcgtactgagttcctgttcatggaccgcgacgcactgcccactgaagaagaacagtttgctgcttacaaagcagtggctgaagcgtgtggctcgcaagcggttatcgttcgtaccatggacatcggcggcgacaaagagctgccatacatgaacttcccgaaagaagagaacccgttcctcggctggcgcgctatccgtatcgcgatggatcgtagagagatcctgcgcgatcagctccgcgctatcctgcgtgcctcggctttcggtaaattgcgcattatgttcccgatgatcatctctgttgaagaagtgcgtgcactgcgcaaagagatcgaaatctacaaacaggaactgcgcgacgaaggtaaagcgtttgacgagtcaattgaaatcggcgtaatggtggaaacaccggctgccgcaacaattgcacgtcatttagccaaagaagttgatttctttagtatcggcaccaatgatttaacgcagtacactctggcagttgaccgtggtaatgatatgatttcacacctttaccagccaatgtcaccgtccgtgctgaacttgatcaagcaagttattgatgcttctcatgctgaaggcaaatggactggcatgtgtggtgagcttgctggcgatgaacgtgctacacttctgttgctggggatgggtctggacgaattctctatgagcgccatttctatcccgcgcattaagaagattatccgtaacacgaacttcgaagatgcgaaggtgttagcagagcaggctcttgctcaaccgacaacggacgagttaatgacgctggttaacaagttcattgaagaaaaaacaatctgctaatccacgagatgcggcccaatttactgcttaggagaagatcatgggtttgttcgataaactgaaatctctggtttccgacgacaagaaggataccggaactattgagatcattgctccgctctctggcgagatcgtcaatatcgaagacgtgccggatgtcgtttttgcggaaaaaatcgttggtgatggtattgctatcaaaccaacgggtaacaaaatggtcgcgccagtagacggcaccattggtaaaatctttgaaaccaaccacgcattctctatcgaatctgatagcggcgttgaactgttcgtccacttcggtatcgacaccgttgaactgaaaggcgaaggcttcaagcgtattgctgaagaaggtcagcgcgtgaaagttggcgatactgtcattgaatttgatctgccgctgctggaagagaaagccaagtctaccctgactccggttgttatctccaacatggacgaaatcaaagaactgatcaaactgtccggtagcgtaaccgtgggtgaaaccccggttatccgcatcaagaagtaattcttgccgcagtgaaaaatggcgcccatcggcgccatttttttatgcttccgccagcggcggcaaaatcaattcatcgctctcatgctgctgggtgtagcgcatcacttccagtacgcgcaaccccgctcggtgcactgcatcggttaacgccttccctttcagcaagccactgatgagctgagcacaaaacaggtcgccagtccctttcaggtcggtttttacccgtgaatgggaaatgacattcacgctgtcggcagtgaccaccacaacctgcatctcctgattttcttcattaccggaggcgctggtaaccaccacccattttaatgtgtctgaaagcagactttttgcggcagcaatggcactgtcgagatcgcggcaatttttaccggtcaggatttccaactcaaagatattgggggtaattccctgcgccagcggcagtaaatattgtcgatacgcttcgggaaggtcaggtttgacataaattccgctatcaatatcgccaatcaccggatcgaccatgatcaataggtcaggatggtctttgcgtagcgcagtcagccactcggcaaggattttgatttgcgatgccgttcccatatagcccgtggttacagcacgaagttggcgcagcgcatcacgctcctgaagcgcacgcaaatagccgctaaaccattcgtccggaatcgcaccaccgtagaaagtgtcataatgcggcgtattgctcagcaataccgtcggcacggcaaagacattcaggccgttctgtttgatagcaggcacggcaatgctgttgcccacgctgccgtaaaccacctgcgactgcacggcgacgatatccgcctgcagtgccctactcttatcgttaaacaacaacaaactactcatttaattttttctccttgccgatgatcctcatcgtaatccaaccgaaactttacctgattctggcagtcaaatcggctatcacaaaacaaggataaggtaattcaatgaagaaaatcatttgtctggtcattacactactaatgacactccccgtttacgcgaagttaactgcccatgaagaagcccgcatcaacgccatgctggagggattagcacagaaaaaggatttgatatttgtgcgcaacggtgatgaacatacctgctatgaagcggtttctcatctgcgtctgaagctcggcaatacccgtaaccgcattgacactgccgagcagtttattgataaggttgcttcgtcgtcatcgattactgggaagccgtatattgtgaagatccccggtaagagcgatgagaacgcacagccttttttacatgcgttaattgcgcagacggataaaacggtgcctgcggaaggaaattaatccgctttgggaaggcatttacaggaggtaacatgaaaaaacgctttatttatcacgatgaaaaatcgaataaattttggtggatagattacgaaggggatagtttagctgtcaactatggcaaggtaggtagtattggtaaattccagacaaaagagttcgataatgaagaacagtgtctgaaagaagccagtaaattgattgccgcaaaaatgaagaaaggctatcaagaagatccaaagtttaacttcatggatcgctactattttgatgatgaagaaattgggttacatgttaaaacgtcacacccaaacttccagtgccattttactgatccactttatatgtgttgctgggatgaagaatctccttttggcagcgatgaaggtgctgatgctctaaacgttcttgaaaatagcctccgtaaagagccggatctggactgtgctgatttccctcaaatgttaattgaaactatgtggggtatgaaatacatcgctatggacagtattcttgaagaggatgttcgtgcgcaattactagtcgatgaaatgagcactatccagagcaatatgattacctacgcaactgcattcggtcagattaaagtcatgggtaaaatctcccataaacttaaaaagatgggactcaatgcactagcgcgtcatcagcttaccgcaaaaattcttcaatggggtgacggtcaggactcaccaatacttcaaaaaatgattgatgaccttacggcgtttcctcacgaaaattaaatactgcatttgtcggcagcaacaactgttaaaaaagtgcgctttgtttatgccggatgcggcgtaaacgccttatccggcctacaaaatcgtgctaattcaatatattgcagaaaccttgtaggcctgataagcgtagcgcatcaggcagttttgcgtttgtcatcagtctccgatgctattaatccttaaatccccgccccctggctaaaatgctcttccccaaacaccccggtagaaaggtagcgatcgccacgatcgcagatgatcgccaccaccaccgcgtcagggttagcttttgccacccgcagtgctccggcaaccgcgccgccggagctgacgccacagaatattccttcccgcaccgccagttcgcgcatggtgttttccgcatcgcgctgatgaatatccagcacctcatccaccagagaagcgttgaaaatccccggcagatattccgtaggccagcggcgaatgccgggaatgctgctgccctcttccggttgcaggccgacaatggtcaccggtttggattgttcgcgcataaagcgtgagacgccggtgatagtgccggtcgtccccatgctggagacaaaatgagtgatgcgcccgccggtttgctgccagatttccggcccagtggtggtgtaatgcgcataagggttatcgggattattgaactgatcgagcagctttccttcgccacgattcgccatctccagcgccagatcgcgcgcaccttccatgccctgctctttggtgacaagaatcagttccgcaccataagcacgcatcgccgcacggcgttcctggctcatgttgtcgggcatcagcaatttcatgcgatagcctttcagcgcggcaatcattgccagcgcaatgccggtgttaccactggtggcttcgattaagacatcacccggtttaatttccccgcgcttttccgcctcgacgatcatcgaaagtgccgcacgatctttcaccgaacctgccgggttattgccttccagttttaaccacacttcactgccgttatccggccccattcgctgcaacttcaccagaggcgtattgcctattgtttgttctaatgtactcacgatctctatccatacgtggtgttgcctgatgcgacgcttgcgcgtcttatcaggtctacaggttacaaaccttgccattaaaaagcccggatcgcgggaagcgcctccgggcgtttaacattcactcaacctatcaggcgctttgtgcgagagcaagttcctcatcgcgggtttcgatacgctcgtcgccgttatacagccgcgcatgttgcagaccaacgaataaacgctcgccacgctgcggggcatcgtcgccatgcatcacgaccgtcagcggttcgttgtaccaccccagcggctgcaccactaattgggtgtagtgacctttcgggctggcttccagtacctgtaccggcagcggcgaatcgaggctggtacggcggctgatatccacttcccaagggcgcaggaagagatccaccggcccctgatacgcaggtgtgtagcccagcggccagcgatgcgcgccaacatggaactgcccgccgcgaatggttccctgcaggcggttcacttcgcccataaattcgagcacaaaacgggtcgccggttcgcgccatacctgatccggcgcgtcagcctgttcaatattgccctggctcatcacaactacacgatcagctacttcggtcgcttcttcctgatcgtgggtcacaaaaacgctggtgaattttagttcttcatggagttgacgcagccagcgacgcagctctttacgcacctgcgcatccagcgcgccaaacggttcatcaagcagcagaatttgcggttccacagccagcgcgcgcgccagcgccacgcgctgtttctggccgccggaaagctgcgccggataacgatccgccagatgggcaagctggaccatttccagcaattttgtcactttcgctttgatggctgcggcattcgggcgctcgcgacgcggcagcaccgtcaggccaaaagcgatattgtcgaacaccgtcatatggcggaacagcgcgtaatgctggaacacgaaaccgactttacgatcacgtgcgtgcaggcggctcacgtcggtgccgtggaagcgaatatgcccgctggtttgatgctccagcccggcgataatgcgcagcagcgtggttttcccggaaccggacggccccagcaacgcgaccatctgacctgaaggaatatccagtgagatatcgttcagcacctgggtgcgaccaaacgacttcttaatattggcaatctcaatgctcatgatgttcctcctgctgtgcgcgtttttcctgattctccaggcgccactgcaacatactttttaaaaacagggtgataatcgccatcagcgttaacagcgccgcagcggtaaaggagccgacggtgttgtagtcctgctccagcaattcaatctgtaacggcagcgacagggtttcgccgcgaatcgagccggaaaccaccgacaccgcgccaaactcgccaattgcgcgggcgttggtcaacaccacgccataaagcagcgcccagcggatgttcggtaatgtgacgcgacggaacatctgccagccggacgcgccaagcaaaatcgccgcttcgtcttcctggctgccctggcttaacatcaccggcaccagttcgcgcaccacaaacggacacgtcacgaagatggtgaccagcaccattcccggccaggagaacataatttgcaggttatgctcgtcgagccaaccgccgagcgggccgttagagccgtagaacagcaaatacaccagaccggcaaccaccggcgatacggcaaacggaatgtccagtagcgtcagcagtaactggcgtccagggaagttaaagcgcgtcaccagccaggccagcagaatgccgaacaccaggtttaccggtacggcaatcagcgcgatcatcaccgtcagccagatggcgtgcagcatgtccggatcggccagattctgtaaaaccggcatcagccccttgctgaatgcctgcacgaagatgtaaatcatcggcaccagcaggatgaacgccgaaaccagcatcccgatgccaatcagaaaccatttgccccagttaatcgggcgcgcgtcataacgcttcaattgggtaacttccgccattaatgacctaccacacgccgaccaaagcgactttgcagagtgttaattgagaacagcagcagcagagatgccgcgaggatcaccgaagcaatcgcgctcgctgccgggtaatcaaactcctgtaagcgcacaaaaatcatcagcgacgtcacttccgtcttccacgcgatatttccggcgataaaaatcaccgcgccaaattcaccaagactacgggtaaacgacagcgccacgcccgccaccagcgccggagaaagctccggcagcaccactttgcagaaactctgccagcgcgttgcaccaagcgtttccgccgcttcttcatattccgggcctaactcttccagcaccggctgcacggtacgcaccacaaacggaatgctggtaaaggccatagccaccgcaatccccagccatgtataggtgactttgatatcaaacttcgccagccattcaccgtaaaaaccgtttacggaaaagagcgaggccagcgttaaaccggcgacagccgttggcagcgcaaagggtaaatccatcagcgcatcaagcagcgtgcggcctgggaagcgatagcgggttaggatccacgccatcagcagaccgaaaacgccgttaaaaatcgatgccacaaacgccgacagcagcgttactttgtaggccgcgaccacctgcgggttggtgatcacctcccagtactgcgcccagctcatctgggccagttgcatcaccagcgcggagagcggcagcagcaaaatcaggcacacaaacagcagactggtgccgaggcttaaggtaaagcccggcagcacgcgtctggaggagacagcaaacatcagttacgccccgccgctaacagcttgtctaactcgccgccgctggtgaagtgggttttcatcacttccggccaggagccaaatttgtcttccacgcggaacagctcggtctgcgggaatttgtctttcagtttgtccatcacctccgggttattcacgcggtagtaatagtcggtgatgatggtttgcgcctgcgggctatagagccagttcagataggctttggcggctttttccgtaccgttggcctgcacgtttttatcaacccacgccaccgggaattccgccagaatgttggttttcggaatcaccacttcaaagccctgcgcttcatactgtttacggatgttgttcacttccgattcgaagctaatcagcacatcgcccaggccgcgctcggcaaaagtggtggtcgcgccacgaccgccagtatcgaacacttcaacgtttttcaggaactgggtcataaactgttcggttttgcctttgtcaccaccgtcagctttatccgctgcgccccatgccgccagataggtataacgcgcgttacccgacgttttcgggttcgggaaaatcagcttcacgtcggagcgcaccaggtcgttccaatcgtggatattcttcgggttacccttacgcaccaggaagcccatggtggagtagaacggcgagctattattcggcaggcgcgactgccagtcggccgggatcagcttgcctttatcgtgcaggatttgtacgtcggtcacctggttataagtgacaacgtcggcttttaagccctgtaaaatcgccagcgcctgttttgatgacccggcatgagattgttttatcgtcagtttgtcgccgccgttatcttttgcccattgttgctcaaacggcggattcagggcggcaaacagctcgcgggagacgtcataagaactgttcagcagttccgttgcctgtacatggcccgccagcagcagagaagcgaccagcgcgagtgagttctttttcagtaagttaacggccattgcgcacccttataaatttaatgactttctaatagccatcatatttataacggacgtgaaaggagtaacggttttatataccgtttggtgatttggaagttgaaaagggaataagaacttggttcaacaggcgtaattgttgcagtcagtttggacacgaacagcgcggagaaaccggagcgtacacatagtacgtgaggatttcgagcactgcccggggccaaaatgacaaataaaatagcctggtgaacttagttcaagacgaaatcctccccacaaatgcagggaggaaacagaggtgaatcagataccgacgctaaccgtctccggcagtgtgctgccgccatcaatcacattctgtgtaccggttaaatagctggattcatccgatgcgaggaaggccgccagttcgccgacttccagcggatcggcgaggcgacgcatcgggattgctttcgccatttcagtcagcaccgactctggatcttccgggttcgactggcgggcaatgctttccgccattggtgtgcgcacgtatcccgggcaaatggcgttaacgcgaataccagactgcgcgtactccaccgccagcgattttgtcaggccaacaatcgccgctttcgttaaggcgtacgccgtttcgccaggatcggccaccatatcaccagtgactgaagacatcatcacaatgcgaccatctttgcgggcaatcatctccggcagcaccgccttcgtgacgttccatacgcctttaatattgatgtcaatatggaaatcgcgatcgtcatcgctcatatcgaggaaactgcccagacgacaaacgcctgcgttattcaccaggatatcaatgcgcccttctttttccttcgcgcgtttgatagctgcggctaccgacgccgggtcacgcacatcggcgacaaccgccgtacagcgatgaccacgaccacacagttcgtccgccagcttttcgatctcaggggagatatccagcaagattaggttcgcgccatgacgtgcaaaagttctggcaattccttcgccaattccctgcaatgcgcccgtaatcagtgctgtcttgcccgtgagtttacccattttaatgctctccttgttaatacagagcgttacactccattccctctgaaaatacaggataaacaaaatattgctgcggatcagctcactaattcaggaaaatctcaatccagtcgctgctttatgcatcatttcaggcgttgtgttagctcactgctgcgctgaatcattttcaatgactccacatcattgagttgcacaaggccaacaaacagtaaatcggtaacagaattttgcgccgtgcgggtagacatcgacgagctacgccattcggtttctccggaaacggtatcgagggtgaaatgcgccagccgccgcagcggagagtcagtcagagaagtaatggcaatcaccgttgccccctgctttcgtgccgcttctgcgcacaagacaatctcttttttactgccgctgtaagagatagcgatttgtacatcgccttttttcaacgcctgagaaacggtggcttgtacgtgcgtgtcggcttcgcaggccacgcgatagccaattttcatcagtttgaacgacagatcgcgccccaccagcgccgatccgcccaggcccgttatctggataaacggtgctttactgatgacctcaatgattttttgcagccgcgcgtaatcgagcaacgcgcaggtttgctccagcgccagctctttttcgcgattcagtttgcgcgcgatcacttccagcgaatcatcactggtaatcgaactgtgcaggtgcagtgccgtggcattcgttttctcccggctggcactgtattcgcctattaacgccatacgcaattcagtaaatccttgcgcgccgagtttttgggcaaatttcactatgctcgactggctaatgccgagctgtttcgccatctgccgtgaagaaacggattgcagctcactcacgttggcctgcagaaagtcagcgattttttgctcgttttcggtgaattcactccccgcattgcttattttcgtcaggtacaacatcttccactctcctgggctggcagcataaattccgcttaagttcttatgacgctcttcacactctgcgagtgtagactcaatgattcctttaagcctgtcaattcgggatatatgattccatacatctgcaattatttgatcgtaaatagtaaggtcaccaccgatgcaatttgaaaagatgattactgaaggctcgaacaccgcctcggctgaaattgaccgcgtatcgacgctggaaatgtgccggattatcaacgatgaagataaaaccgtaccgcttgccgttgagcgcgtactgccggatatcgccgcggcgatcgatgttatccacgcccaggtaagcggcggcgggcgtctgatttacctcggtgcgggaacatccggtcgtctggggattctggatgccagcgaatgtccgcccacctacggcgtgaaaccgggtctggtggttggtttgattgctggcggcgaatatgccattcagcacgcggtggaaggcgcggaagatagccgggaaggcggtgttaatgatctgaaaaatattaatttaacggcacaggatgtggtggttggcattgctgccagcggtcgcacgccgtatgtgattgccggactggaatacgcacgccagctcggctgccgcacagtgggaatttcctgtaatccggggagcgccgtttcaaccaccgctgagtttgccattacaccgattgtaggtgccgaagttgttaccggttcttcgcggatgaaagcaggtacagcgcagaaactggtgctcaatatgctttccaccgggctgatgattaaatccggcaaagtgttcggcaacctgatggtcgatgtggtcgccaccaacgaaaaactgcatgtgcgacaggtcaatattgttaaaaacgccaccggatgtagcgcagagcaagcggaagcggcgttaattgcttgcgagcgcaactgtaaaacggccattgtgatggtgctgaaaaatctcgatgccgcagaagctaaaaaacgcctggatcaacacggcggctttattcgtcaggttttagacaaggaataacccatggccaaagagatcagcagtgaacttctgaacaccattcttacccgtgtcggcggaccgggaaatatcgccagttgtggtaactgtatgacgcgcctgcgtctgggtgtacatgacagttcactggttgatcccaatatcaaaacgctggaaggcgtgaagggcgtcattttgaccagcgaccaggtgcaggtcgtttttgggcctggtaaagcgcatcgtgccgcaaaagcgatgagcgagctgctgggagaagcaccggtacaggatgccgcagaaatcgccgcccagaacaaacgtcagttaaaagccaaacaaacctccggcgtgcaacaatttctcgccaaattcgccaccatcttcacgccgctgatccccggttttattgccgccggtctgctgctggggatagcgacgttaattgccacggtgatgcacgttccggcagatgctcagggaacactacccgatgcgctgaattttatgaaggtgttcagcaaaggtttgttcactttcctggtgattctggtgggctataacgccgcccaggcatttggcggcacgggcgtaaatggcgcaattatcgccgcgctctttttgctcggttataaccccgcagcgaccaccggttactacgccggttttcacgatttctttggtctgcccatcgatccgcgcggcaatattatcggcgtgctgattgccgcgtgggcctgcgcccgcattgaaggcatggtgcgccgctttatgccggacgatctcgacatgctgctgacctcgttaatcaccctgctgatcaccgctacgcttgcgtacctgatcattatgccgctgggtggctggttattcgaaggtatgtcatggctgtttatgcacctgaacagtaatccgttcggttgtgcggttttagccgggctgttcctgatcgccgtggtatttggcgtgcatcagggctttattcctgtttacctcgcgttaatggacagccagggattcaacagcttatttcccatcctttcaatggcaggcgcgggccaggtgggcgcggcgctggcactctactggcgggcgcaaccgcacagtgcgctacgcagtcaggtacgcggggcgattattcccggcctgctgggcgttggtgaaccgctgatttacggtgtcaccctgccccgcatgaagccgtttgttaccgcctgtttaggcggcgcggcgggcggtttgtttatcggcctgatagcctggtggggtctgccgatgggcttaaacagcgcctttgggccgtctggtctggtagcgctgccgctgatgacttccgcacaaggcatccttccggccatggcggtttatgctggcgggattctggtggcatgggtttgcgggtttattttcaccacgctctttggctgccgtaacgtcaatctggactgatatcatgaaacggacaatgctctatctttctctgctggctgttagttgtagcgtcagcgccgcaaaataccctgttctgacagaaagctcgccagagaaagcagggtttaacgtcgaacggcttaaccagatggatcgctggattagccagcaagttgatgtcggttatcccagcgtaaacctgctgatcattaaagataatcagattgtgtatcgcaaagcctggggagcggcgaaaaagtacgatggcagcgtgttgatggaacagcctgtcaaagccaccaccgggacgctgtatgacctggcctcaaacaccaaaatgtacgccacgaacttcgccctgcaaaagctgatgagcgaaggcaaactgcatcctgacgatcggattgcgaaatatattccggggtttgccgatagtccaaatgacaccattaaaggcaaaaacaccctgcggatttctgacctgctgcatcacagcggcggtttcccggcagatccgcaatacccgaataaagcggtcgcgggcgcgttatattcccaggataaaggccagacgctggagatgatcaagcgcacgccgctggaatatcagcccggcagcaaacatatctacagcgatgtcgattatatgctgcttggatttatcgtcgagtcggttaccggtcagccgcttgaccgctatgttgaagagtcgatttatcgcccgctcggcctgacacatacggtatttaacccgctgctgaaaggctttaaaccgcaacaaattgccgccacggaattgaacggcaatacccgcgatggcgtgatccatttcccgaatatccgcacctccactctctggggtcaggtgcacgatgaaaaagccttttattcgatgggcggcgtttccgggcacgcaggtttgttttccaataccggcgatattgcggtgttaatgcaaacgatgctgaacggcgggggctatggtgatgtgcagctgttcaatgcggaaacggtgaagatgttcaccaccagctctaaggaagatgccacttttggcctcggctggcgcgtgaatggtaatgccaccatgacgccgacgtttggcacgctggcaagcccgcaaacctacggtcacactggctggaccggaacggtgaccgttatcgatccggtgaatcatatgacgattgtgatgttaagcaacaagccacattcgccggttgccgatccgcaaaagaatcccaatatgttcgaaagcggtcagttgccgattgcaacttatggttgggtagttgatcaggtgtatgcggcgttaaagcagaagtaataaaaaggccagtcagtaatgttactggctggtctgagagtgctgacaaacgcaaaactgcctgatgcgctacgcttatcaggcctacgtggagcccacaatatattgaattagcacgatttcgtaggccggataaggcgttcacgccgcatccggcgtgtacaacgcgcacttggtcaacaatctgaggccagtcagtaatgttactgcctggcctttaatcaatgaatcagaaacgcttacagcgccatcaacttgtccagcgacggtgcgaaataatagccgccggttaccggtttggtgaaacgcaacatcgcatcacgcttaccatcggtatcgccaaacatgctcagcagttgctgctcaatgttatgcagacgcgcgcagtaggcgcagaagtacagaccgtgagtgccactggcagtgccgtacggcaggctctggcgaacaatcttcagccctttgccatcttctttcagatcaacgcgggtgaggtgagaggtttccggacgttcgtcgccgtcgatctcttcgttggcctctttggtgcgcccgatcaccatctcctgatcgtgaacgctcatccggttgagctgcttcaggttgtgttcccaacgctggacaaacacatagctgccgcccgcatccacgccgtctttgataaccgccacttcgcgacgcgtctcttcacccgccgggttttccgtaccgtcaacaaagccgctcaggtcacgctcttcaacccaacggaagccgtggatctcttctttcacttcaatgcagtcaccaaaggcttccatcgccgcctgggcgacagagaagtttacgtcgtgacgcagagaaagaatgtggatcaacacatcgaactgggtcgtcggcgcaaggcctttaccgtagcccggaaaatctttcagctcttctgccccaacgccgccgctcagagcgcgccaggtgttgttaccaaaggcaaccaccgcaccaagatgcgcgtccgggaatttcgcttcaaaagttgccagtttgtcggcaaatgttttactggccgcacgcagggcgtcaacttcccctttcacgttggcttcgatccaaatcgccgcgcggcaatgttctggcaaaatgccactctgaacctgagacattgttcctcctgaaaataataatgccacgcaatccgtggcattgttgagcgctattttacgtgttttttcgcggcggcggtttgttcagacgcaaattaacgccgccagataattttactgactttccagtttttcagggtatcgtccgaaggcattaacccttcaggaccacgccattccccgctgaactggtagctaatatgttgactgccttcggctttacattcgacggcacgattatcatcaccatcagctttttggcaattgccaaatgctttgctgtaaaggtcgctaaacggtgtaccgattttaacaccggtgtcagcaggaatatcgctatccagcacgtcaatgcgactgatcgtgccttgatcgccgttaatcaccatcgccacgttgtcgcccttcatcacttcaaaaaagcgcaccacgttgccgttcgcggttttcattccgctgcgcaggcgataatcgccatcaagcgcatcggcaatggcttgttcttgcagtggtgtggacgccgttaattcacccacgccctgctcgctcactttggtggacgacccaaaccagttccacgggttagcggcagaccagttaactgacgacatcgtggaacagccggtcagcatcaatggcatagcgcataacattaaacgcagcgatttcatgtcacttcctttggttattcaataacgttgcttggagtgcaaattcaccaaaaagtgccgttattcttttacttcataaaaacaagcgcgtaaacgtcgattggtcagcagccagattaacgccacaatatccgccactaccagcgccagaccgataccgctaacggattcaccgttcagccacagccacggttgccagcaaagtaaaaccacctgcgccaacagcaacagaaaatagagtacacgccaggtgcgaggaaacgtagcccgccgaccgctcaacaaaaacgccagcaccgccggaatgccaggaatcagccccagccagaaattatcgtgatcgggataaaacagatttagcagcgcagtaccctgctcgcgcgacgcaccggcaatgacaaacagcacccaggttcgcgcctgaagcaatagcacaagccagaagagcaagggtaaacgcaggcgaccgtgcgcatcataatggacaggatgaaactcagtactcttcatcttcaatcaaacgcttacccagactcagcacgtcggcgtgttcatatcccaggcgttcatacattccgagcaccatgtcgttatcttccggcacattgatctgaattttcgggcagccacgagcaatcagctttttctccagccgattaagcaacgcattggcaatcccacgcccacgaaactctggatgcacgccaagataataagcagacccgcgatgcccgtcataaccgcccatcaccgttccgaccacgtcaccgtttacctcagcgaccaaaaacaaactgacgtcatggttcatcttacgctcgatgtccatttccggatcgttccacggacgcagcaagtcgcaacgctcccaaagggtgatgacctcttcgaaatcttcctggcgaaatacgcgtatctccatggtattcgttacctttttgcgggttaaaaggctgattatggcgtgaacggtcgaattagccaatatctgacgaaaatcggttgaaaaagtggcataatggggagttgtcaactattgaaatgaaaagtaaaacaattctcaacagcaaaccgtcgtaacggattacgcgatacgatataacatctggaactttattattacaactcaggccgtatgagcacttttaaaccactaaaaacactcacttcgcgccgccaggtgctgaaagccggtttggctgccctgacgttgtcaggaatgtcgcaagccatcgccaaagacgaacttttaaaaaccagcaacggacacagcaagccgaaagccaaaaaatctggcggcaaacgtgtcgttgttctcgatccaggtcacggcggaattgataccggagcgatcggacgcaacggttcgaaagaaaaacatgtggtgctggcgattgctaaaaacgtccgttccattttgcgtaatcatgggattgatgcgcgtttaacgcgttctggcgatacgtttatcccactttacgatcgcgttgaaatcgcccataaacatggcgcagatctgtttatgtcaattcatgccgatggctttaccaacccgaaagctgccggtgcttcggtatttgccctctctaaccgtggggcaagtagcgcaatggcgaaatacctgtctgaacgcgaaaaccgcgccgatgaagttgccggtaaaaaggcgactgacaaggatcacctattgcaacaagtgctgtttgatctggtgcaaacagataccattaaaaatagtctgacgctcggctcgcatattctgaagaagattaagccggtgcataaactgcacagccgcaacaccgaacaagcggcatttgtggtgttgaaatcaccgtcggttccttcggtgctggtggaaacctcgtttatcaccaacccggaagaagaacggctgttaggcacggcggcgtttcgtcagaaaatcgccacagcgattgctgaaggcgtgatcagttatttccactggttcgacaaccagaaagcacattcgaaaaagcgataagttatgaaacccgacgcacaccaggttaaacagtttctgctcaaccttcaggatacgatttgtcagcagctgaccgccgtcgatggcgcagaatttgtcgaagatagttggcagcgcgaagctggcggcggcgggcgtagtcgggtgttgcgtaatggtggtgttttcgaacaggcaggcgtcaacttttcgcatgtccacggtgaggcgatgcctgcttccgccaccgctcatcgcccggaacttgccgggcgcagtttcgaggcgatgggcgtttcactggtagtgcatccgcataacccgtatgttcccaccagccacgcgaatgtgcggttttttattgccgaaaaaccgggtgccgatcccgtctggtggtttggcggtggcttcgacttaaccccattctatggttttgaagaagatgctattcactggcatcgcaccgcccgtgacctgtgcctgccatttggcgaagacgtttatccccgttacaaaaagtggtgcgacgaatacttctacctcaaacatcgcaacgaacagcgcggtattggcgggctgttctttgatgacctgaacacgccagatttcgaccgctgttttgcctttatgcaggcggtaggcaaaggctacaccgacgcttatttaccaattgtcgagcgacggaaagcgatggcctacggcgagcgcgagcgcaatttccagttatatcgtcgcggtcgttatgtcgagttcaatctggtctgggatcgcggcacgctgtttggcctgcaaactggcgggcgcaccgagtctatcctgatgtcaatgccgccactggtacgctgggaatatgattatcagccaaaagatggcagcccagaagcggcgttaagtgagtttattaaggtcagggattgggtgtaactccctcacccccactcccgcatccgctgatgcagcgtcagtgacggcttctcggaaaacagctgctggtaatccgtggcaaattgccccagatgccagaatccccactgcatggcggcgtcttttaccgtcatactttgcgaccacggacttatcagttcgcggcgtacggcgttcaggcgaatgcgtttcagccacgcgttcgggccaatgcctaaaatagcgtgaaacgcgttttgtagcgtgcggcggctgacatgcagttgattacacaaatccagcaccgtcaccggttcggacatgttttccagcacatattcacgggcgcgggaaagcaatcgacggtaactctgatgactgatgctttccgccgtcaccattggttgcgcttcttccagcatggcccccatcgccattagcaaattatcccccagcacttttcgcactgcaggctgatggagattttccggattctcgcaaaacgtcgccagcgcctgttggacaaagccccacagcgcggctttatgctgctctttcacttccagcgccgactggttacgcaacatatgtaatacccgatccgggttatgcaaaaagttagcctgccgggtgatgacatcttcagaaagcaccacgcccaggatcgtgtaatcatccggcgtgctcagttcaaattcagtgccaccagggcgggtggcgatttccgcgcttcccagacattgcgaaccgataaatccctgctcaccgcgcgtcgccggaatgccaaaccagaacgagttcggccagaccaggcacgactgacgcagcgccagaccggtgtattcacgaaaaacctgaatatcatcgagtagaatttccgtaaattcaccatgaaacttgcccggatgcagctgatcgtaaatctgctgccaggcggtaatcgttaaagcatgttcatagacatccgttgtctgtcgttgatgaacattatccacttcgaccttcggcgtgagcttcaggttttcgggtaagggttcatgataaagatggtgcaaattggctgtacgggtctttttcatgatgttaatgccgggtgttgtaggacacccggcacctccgacaggttaatggggcttgagacgataacgactactgcgtttacgtaacgtcccggcagaaaagagctgttcgagcgcatttctggctttttccagcggccagccaaagtgggcagccacttctcctgccgtcattccctgacgtactgatgttaacagcgccaacaactcgtcagcagattccgcgacgataactggcgcgtcgggttcccttacgggttgcttcggctggcggttaaagccagtaaccagccactgggtgtcatcgtctggccgaccgatctccttgcggctgatgacacgcccggtacgcatcgcggcagcacaacctgcgtccagcgccgcacgacacgccgccagatcgccttccaccaccagcgttaagcgaccagggtcaagcacttcgtgactgagcagacgaacgttagctgctttgagcatggcatccgctgcatctatcgcggcgaccatgccgtccacttccagcaatcccagtgcattgatcatcggcaacctccgttacgcacgctggattggattacgcgcgatttccagcactgcatcggtaaaggcgttacaggctgctttacacgctgcctggctaccggttaaaaatgctgccgagtagttggtttcagacggtggcgggacataggtcgccagctgtacgtcggcagacttcagggctgcatcaatgccataggtcgcttccagcggcggtgccaccagatacgccatcggatcgccaagcgtgatcccggcggttgatgagagataagaaccggtacgcgaaactacatgtgccaggaatgccgtatcttgcgcgtcattagcccactggaaagctgcgccattttcaatatgcgcaatcatcgcatccagacctgcacgcacttccgccgggtttggcccaccaagcataatcagcacttcaccggcagtcggtgacgggccgtgtgcagcgcccgcatatagcgagcggccatacaccacttccaccatcgcctgcttggtcgcttcatcagcggcaatgtaggtgacgtcatcggagtcggcagaaatcagaccgaggctacgaatatgcggcggcaatttcagttcacgcgcaaaatcggcgttaacggaggcaatcacccgcatagcggtgacagacggtcgaatcaaatctaaagctggcatgatgcctccttatcgggtcatgttgatgccggatgctttctgctccagcatacgtttcgccaaatccacaatgacggctgcggcttcaaccggcggcgtgccgccctggtgaatgttagagatacaggtgcgatcggcctcaacggtggtcgccatacgcggcgagtaaacggcgtagcaggagaggctttctgactgacccaaccccggacgttcgcccaccagcaggatcactactttcgcgccgaggatctcaccgatctgatcttcaatcttcacgcgaccataacgaacaaagaatggtgtaccgactttcagcccggcctgtttcaggcccgccatcagcggtggcaggatctcttcgtagttcacggtgatcgcatcagttgacaggccatcagaaataacgacctgtacgtccggattggcaacacactgcgctttcagcgcttcaacagcttctgcacacaggcggcggcccatatccgggcgagtcaggtagagatttttgtcgctaatttcagagcgtacttccagcaagccctgcgctttcacccactcttccggcacttctttcagtacggtatctttcgaacgagagtgatcggccaggaaacgcagcagcgcctgcgtacgtggacgcggaccggcacgaccggtacaaacgcgggccacggtgctgcggcgcagttctgttaatacgtctgcgcgatgcggattttcaacaccaatccacgcttttgcttcagcggaacctaaatccagcgcacagctttccgaggtcaccggtgccgcacagttggtggtggcgcactttgcttctgacggcgcgggggccgcttgtcccattgacgccatcacgctgcgtacaatttcttcaatctgtttttgatccatgatatgttatctccgcgtcatcagaagaacagtgacggatcgcccgcccgtttggtcaggcgaccgtttgccataatgcccatgctttccagccagcgttcaaactccggtgacgggcgcaggttgagtaactgacgcacagtggcggtatcgtggaatgcggtggtctggtagttgagcatgatgtcatcacccagcggcatccccatgatgtagttgcagcctgcggtggcgagcaggatcatcaggttttcgttgaggttctggtcagcgtcagcgtggttggtataacagcagtcacagcccatagagatgccgctcagcttgcccataaagtgatcttctaagccagcacggataatctggcggtcgttgtagagatactccggcccaataaagccgaccacggtgttgacgataaacggatcgtaatgacgcgccagcccgtagttacgtgcttccatcgttacctggtctgcgccgaagttagcgccagcggatagcgcagagccttgtccggtttcgaagtagaggcagttttccccggcgatacggttgaactccgcgcccactgcgcgcgcttcgtcgagcatcgccagctccacgccaaactctttcagccctttttcgctgccacagatactctggaaaatcagcccgcccggtgcgccacgacggatcgcttcgatctgggtggtgacgtgcgccagtacacagccctgagttgggatgttgaatttgtcgatcacgccatagatggtatccaacacgcggcttaagttttccacgtcgtcagtcaccgggttaacgccgatcaccgcatcgcccaccccgaaggaaagcccttcgtagatttgcgcggcgatactttgcacgtcgtcacgggtgtcatttggctgcaaacgggcgctaaaggtgcccggaataccgatggtggtattggcctttttgattaccggcattttcttcgcgccgtagatcaggtccgcgttggagcaaatcttcgctaccgccgcgaccacttccgaggtcagccctttgcgggtaaaggcaatgtcgtccacgctggtttcatcgctcagcacatactcacgcagttcgctgatgctccagtttttaatctggttgtaggccgtttcgttaacatcgtcctgaatcagccgcgtcacgcagtcatcttcataggcaatcaccggattattgcggatgtccgctacggtcatttccgacaacacctgctttgccgccacgcgctcctgtgagcttgccgctgcgacgcccgccagcacatcccccgaacgcagttcgttggctttagccagcacctcttttacatccttaaactgatatacattgccgaacaatgtggtctttagtttcataagtcgttccctcaggaagaatcgatgattggcatttttcacagcattctaacaatcacgtttcatcgtcagcccttgtcgtgtaaggtggttgcctaaacacgcccgttattcatcacgccgaacgcgccggatacatgatcggggttatccagtcgttaaatcaaggtatccggttttgagcaagacaccactcacagcaaaggccatagacgccgcacagccgcaggacaagccctataaactcaccgattcactgacgccggggctgtttttgctggtgcatcccaacggttcgaaatactggcgattcaggtattggctgaataaacgagagtttttgcaggccattggagtttacccgctaatcacactcaaagaagcacgcaggcgcgccacggagagcagatcccttattgccaatggaattaacccagtggaacaagcccgcaaggaaaaagccattgatgcgctcaacatggcggcaggatttaagaaggtggcggaagactggtttgctaccagggttggagggtggtcggaatcctatgcaaaacaggtcagatcggcactagaaaaagacgtctatccggtacttggcaagcggtcgattgtcgatataaccgcccgtgacgtgctggcattactccagaagaaagaacgtaccgcaccggagcaggcccgcaagctacgccggcgcatcggtgagatcttcaagtttgccgttatcaccgaactggtaacgaggaatccggttgcagatcttgatacggcactgaaggcccgccgacctggtcacaacgcgtggataccgattagtgaaattccggccttctacaaagcccttgagagggccgggagcgtccagattcagacggcaatacgtttgcttatattaacggcattaaggaccgcagaactgcgtttgtgccgttgggaatggataaacctggaggacgcaacaatcacattgcccgctgaagtcatgaaggcccgccgcccgcatgtggtcccgctatcacggcaggcggtcgagctattgcaggaccagttcacacgcagcggatacagtgctttcgtctttccaggccgattcatggataaacccttgtcagccagcgcgatacttaaagcgcttgagcgtatcgggtacaagtcgatagccacaggccacggctggcgcacaacgttcagcaccgcacttaacgaatcaggcagatactcgccggattggattgagatccaactagcccacgtcccgaagggaataaggggcgtttataaccaggctgcctacctgaagcaacggcgagcaatgatgcaggattacgccgacgctattgattcaatattggcaggtaacggcaatcctctagaaccggaatgaataattaagcggcttttttgcaaagcgcaattttgcattttgtataagtatttgttttgtgtggtttaactatcacctgataagaaacctgtattcaatttgccggattcgtccggcttttctttttcgctaattattccattattccaattaagtggaataaattattcaatatcaagaacttaaatccatgtttgcaacgaaagatccagagttcgaaaataggatcaacacaaataaaagcccccggaatgctgcaacatgccgggggcggtatgagaaacaagctaaaggagaatttctcatgtctgatatgctagcagtagaacaagaaacaaacaatgatgttcgtcaatttttaaacaaaattaacgagttacggaataaagcacccaaaaacgaagagactaaacacgaagaacacacgccagataatcacgaggaaacagatcatcacgaggcaaaacagcaggagcaagcctggcgtggcaacctgcgctacctggacacattaaaccgacttgatgaagtattgccccgcaaactgtacgaaagatgggagaaagaacatacagtcaacgacgaggctgtgctacgtgctctttgttacttcgctggtactggcaaaaactcacagttgggatggtgcagggttggtaggggaacaatcgacaaacgagccaggctatcaaaaaacacggttaaaaaatgcctcgatcgtctggtcaaccacttcaaacttgttgagcgtactgaaggctatataccaggatcggcagaaagggagtgcaacgaataccagttattattcaagccgtacaacatgaaataacggaatcaggcgggcaatgttcccgccttttctttgccttaattccatgaattcaggtgggtcaaaagttgccgttagtggtgggtcaaaagttgccgttaaggtgggtcaaaagttgccgttaaggtgggtcaaaagttgccgagtaagaattctactattaagaattctaggcgacgggagttttttagcctcccggtcggtcatagagagtcgcctagagttaaacagaagaattatttcgccgcctgataggtcggctggttgcgagcattaaccatgctgattagcgcaatcatttccagcaagctggaaacgcccattcactcacgcacaacctgaacagcagaccaacaaaccatcatggcattcgttcatggggagcgcggtatatctcaaagggtgatttcttattggtgggccttcggaaggcttcgagcaattgccagcttaaaagacgggcttagcagtgatggttatccgccacgaatgtccgtcatattgcattgcgcagaaacgcgtggcactgagggagttttccgaattagttttggggaccctttccctgcttctggagcaaaagacgaacggcaaatgcagtgcttccttgtacgactgcagcgaagaagaaaagctgtttgttaagcgcctgaagttaatcaaagcggatatccacgcccagctgaaggcctgtgattgcgatatttctgaatgacaggtggaatcatgaaacacgtttttaaatatcttgattttgcagaagaccgcgaacacgcagaatcagtggcgaccaaagagttaaaactggaccacgtagaaaaattcgctatccgcgatctagccaatgatatcaaagagcgtgggtgtgttgagcttgtccagcctggtggattcgatgagctggttcagatctatgaggccggaggcgatggaatagagccactcaattgtggaatcgaatcaaggaaggtggcaattgctgccctgcttcgcgtcatgcgtgaaccagactttcaatgcctggaaatggttcacgaaatcataagaattgctagagatttggaagcgccagttgacgctccgttagattgctaacgccaaaattagcgctgaattaatgggtaattattgcggtttttgtcaattttcaacctcaattcttgcgaaaaatggcaaaaataacggtatttttcatcatttattgggggttttatggaaggcgaactgatagaaaacaatgggttagacatttatgacaccagcgaaacaccgaaaaagcgcggtcggccagctaaatataatgaaaaaatagcaacgcaaatcgtcctattggtaagcgaaggttatagtttgcgcaagatcagcatgatgccagggatgccgagccaccgtcagatgatgcgctggcaactggagcatatggacttcagggaagggatagcctggatgtcgtggctatggtgcgctgaagctggccgacgtgccgtcgagataatcgacgaggttgatataaacgcagaggatgggccgaagcagttgcgcaaagcagaagcaaaggcaaaggcactactggcagcagccaagctgaatagtttgaaacattcaccatttggagatgacaaacaatgagcctgatccgcactgaaaccagagacacaaaacgcgcagctgacccactgcacgacctgcgtagcaagccgttttctgagtggggcgaagatgaaatcaggcgttttaatctgatagacgcgcttcttgagtttgtctacacagacacatccagcccgttcggtatcggcatgaccttcgattacacggagtgctgggaaattggtgttcgtgacgactgcctggtaatgacacgcgttaagccggtgcatccagaatatgcgaagcactggaacatgaaaggcgtcatgaatgacaaaacccgcttccacgccgacaagtgggtagggtacagcaaggtgcttgcctgggtgagcttatcgcacaaagacaccttcacgggtgcgaaacggtttcaatacttccaaacgatgtacgacatggaacggcaaatcaacgcaaacctgccggttggcggccttcccaacgttgacacagagcgaactggcaaactgttccaacgcgatgacttttctgaggatagccatgccaacgatccgaagttggttggtgatgattacgtcccccaggcaccggagcaaatcaactgaattttcggacaaacgcgcgcgtagccgacgtcagcggcaagactggcggtcatttccccgctcctacgcgaaaaatccctcacaactaccctgcaaattttccagatttcacgtacacgcgccaaaaataaaggcccaggcagttagcaacctacccgggcctttctcacaatccccgctgacattatatcacccatctttccgttttcaggtgggagactgatggccgccgacgttgcacaattgattaatttctgaacattcaaatcaactcccaccaaagccaacaagatgggaggtgaattttgtgatgcagatcgctttttcccttcaggcatttttgtttaattcaatcaacgaaaggcagttcccaacaacaaaataaagatgggaggtaaaaatgaaacggtgggaagtggctttactggtgatggtaatgttggtttgctgtattgaactgtgaaggaggacgccatgaaacttttaatcgcaatcatcctgatggtgctgactggtgtttgctttgcagatgttggtgattacaggctgaacggggaggataacgcaagaattgaatcagtcgttactgataactgtgaaaaaacagccgtattggtaggcggtgacaggcttgcgagggttgagatcgaatatatagcgacattgtgcaagccggtggctttggtgattatttacgacagatttgacgatatagcggcaatccctcttaaggtgacgttgaaaaaggtattgaaagagaatagcgatgaaaagattaacctattgaacaagatgggggatctggctggtcgtatcgttgcagagcagtatttaggcatgagttttgagtaaggaggcaatcatgaaagtgttaggtaatattttatggtgggcttttgttggtttcatggcttacgccactttgattaagccggacaacactgatccagctgttgtgaactatgaagagcctttgcctatggagcttgccaactatggcgaaccaggtgaaggggcgaaaatcatgaatgccgcaaaaataatgggtcgcgactacgcatggaaacatgtaaaagaagacaggttgccatgtctgtttgccgccggggttgttgctgataacatcctggtaaaataccatttcagcaatgaaactgagttcaaacttaaagcggcagcggtcagagaatgcgccaacgtagcagaaaacaacggctttgttttggtaggtagagtatttgaaaaacgtaattgattgcgaatagcaacaactaaacaaccaatacacccggcccctcgccgggttttttgtgatctgcgtcaatattcccttccgttacgcttaccctccaccaatacgcgtgttaacctcccaatggattctatgagatgggagataaaaatcatgagttacgaaatcaaaatttgcgacatcctcaaaggcgctgcgatggaaggacaatataagggcgctcaacgtggggccaaatgcgaggagatcgcaaacgagttaactcgccggggagttaaaaacaacaagggagaggttattactaagggcggcgttagccattggctggaaggtagacgggagccaaatttcgacactctggctgaactgtgcgacatgttcggcgtttatgccctgatgccgatgcgtggcggtaaatggattcgagttcacccggaagaccgtggagaaatggaattacgcgaggctgtagctgaacgagatgctattatcgacgacctgaaggcccgtatcgctgagcttgaggcggcactagcaaataaacaagtcccagcagaagcggaagagatgggaggtgaaaaagtggaagaagtggcagcagagcaagcgcccaacgatgaaaaagagatgggagctaaggagtgggttaacccgaacccgaaaaaatacagcgtcggcatgttgtgtcaggtactggctgcaatgggcggcgaatacctgggcaacaacgcagggttacagcagaagatcactgtgttggataacgacggcaaccggaagccaatcagtaacggcgcgttttatcgactgattgagcaggccaaagggagaggattgattagcgttgaacaggaaatcaaacacaagaaagacgaaaacggcaaccagatcggcaaaggcaagaaaggtgacaagctgataactttgcttcccaactggattgataagctgggagacgaataaaccagccttcaaccccatctcatcaatcaacgcccggccccgctgccgggtttttgctatgcaccacaattaccccaaccggatacacagccggatacaattccaccagcacccagccacccagcgccaccgctggcgaataccgcattcaggaaggaaatgcgagtgatttcaccgtcaccggcacaaccgatccgccaaaaagaggcgtaccaatgtcgatatagtcccccgcgcggacaatcacttcgtcaatgactgccaacgggagttgttgtagctgtgggcgcaacaacatgcccagagctttaccaaagtcctgcccggccaccaccagcaggggatgcggattcggaaaacgcgcgacgaaatcgaccaacgcgttgatgaccgtcagtaccgcggcgtaacgcacaggcagcgaggcgggaagcgccagcacgtacgcgtcagttttgggatcaagatccagctgaatcagcgcctgttgccaggcccccaccagatccgtttcatcaatcgggatcgccaccggcaaattgcgcagcggcagttgtacgccctcaagccagattgtgctgccagagagcgaaagggtatgcgcgcccgcgccaatcaccgtggcgcgcacggtttgcgccggaaactgtacgttcatctcacgcaggcgcggatggtcatgcagcgcagttgccagcagcgggccaatatcggcaaaacagaacgggtcggcgggctggtggcgataacattcgcccacgccgccagaaagcgtaatgatttcgggcgtaacacctgcgggcagcaaaccggtttgcatcaatgcctgcgcgagcggtgagagcgttccgtcaatcacttcgacaatcagttctgccatccgccgggtcacctgcaccagctgcgcgccggtcagcgaacgggcgtcggtgcctgcaccgaagcactcatccacaatcatctgccccggtttatgagcgtaaaccacgcgcccgtggctgtcggtttccagcaggcgaccaccgacgttgaggcaggcagtgccgctgatttttccggcatcgaacagggcgtagttcgcggtgccaccgccgatgtcgatattcagtacccgacacagccgttgttcagaaagggtttgtgccccggctccgtgaccggcgatcacggattcgaggtgcggcccggcgctggcaacgacaaaatcgcccagcgactgagagagcgccatcaccgccgggcgagcattgcgggttttcgcgctttcaccggtgatgatgatggcaccagaatcaacgctttccggctcaatacccgcagcatgatattgctcgagtattaaggttttcagttccgcttcttttaaaccgccctgtttatcgacaggggtaaagaacaccggactttgccagctaatttcgcgtttaatgaattcgtagcgcggcacctgcgacaccgccgcacggttaaccagctccagccgggagaaaatcacctgggtggtggtggtgccgatatcgataccgacgctcaatagctggcgagtgttcacgattgtgcctccgcttcggttttagtcgcggtcgcgtcttcttttggcaccagcatcatcgccacgccaatcgccgttacgccgccgatcaacttgccgacaatcatcgggaagatcatggcgttcatgttggcagcggcgaagcctaagtggtcgcccagggcgaaagcagcggaaacggcgaaggcgcagttgatgactttgccgcgggtatccatctgcttcatcatgccgaacatcgggatgttgttggcaagcgttgccaccatgccggctgccgcgatgttgttcatattcagtactttaccgacgctcatcagcggtttttcaaaccagcgagtcagcagcagcaccatcggatacgcccctaacagaacgcaggagatagaaccgataacttcaatggcgcgcatcacctcaccgggtttatcgccaggggccataaagataggatccagaccggggatcagttcccagccaagcaggaatttcactaccgcagcggcaagaccgagggtgatcaatgcaacgaggaatttggcgaagatctggaagccgttgatcattttttccgggatgaatttcagccccagcgccaccagaatcgcaacaatgatcaccgggatcatgttcatcaggatcagggcgaaagtgaattccaccggctggccgttgatctgcacaccggagtacatagcaaccagaccaccagcgatacaaccaatcggaatggtcacaatgcccgccagcacgccgagcgccagataacgacggtcagaaggttcgataatgccgagcgccaccggaatggaaaacacaatcgttggccccatcatcgacccgagaattaacccagagtatagccacgcggctacgtcgccgcccgccagctctttggcgaggaagaagccgcccatatcgcacgccagcagtgttccggcgaacatcgatgggttagcgccgagcatttcgtaaaccggaataattaccggcccgagaacgtgagccagtaccggtgccagcgcggtcataccgaccatcgccaggcccagtgcgcccattgccataaagccttcttcgaactgaccgcctgatccttcgatacttttaccgaacttaccgaggaaacgagcagaaccgccgaactgcgacaggatcctgtctacggcagctatcagcataaagaacatcatgatgtacatgatgatttcgttaattcccatcgcctttactccctgttagttgttatttattggcggatgcggcgtaaacgccttatccgccctacatgtgcaatcccgtaggctggataagacgcggcaagcgtcgcatccggcaattgcaccgcgccactggcggatgcggcgtgaacgccttatccgccctacatgtgcaatcccgtaggctggataagatgcggcaagcgtcgcatccggcatttattgcgccgctgcgtacaggccgacaatctgctccaggctggcggtacgcgggttactgcgcagacaaatatcttccagcgcggcctgcgcccatgcgccgtaatgcgcagatgtcgcaccaacatcgcccagtcgtttaccaatcccaacttccgcaatcagctcacttaccgcgttaatagcgtcacgatcgtcggattttttagttcgcagtgcccgaccaatctgactaaagcgttcacgacaaaccatccggttaaattccatcaccgttggcagcaacatggcgttcgcgagaccgtgcggaatatgcagcgccgcgcccggctgatgcgccatcgcgtggcacaacccaagacccgcactggaaaacgccattcccgccatacatgaagccagcaacatgctctcgcgcgcggcaaggtcgtgaccgtagcccaccgctttcggcagcgatttgccaatcatcgcaatggcaccaatcgccagactgtcggtaaacggtgtagcgttcagggcgctgtatgcttcaatggcatgggttaacgcatcaatgccggtcatcgccgtgacatgcgacggcacaccttcggtcaatgcggcgtcgaggatcgccacatccggcatcagcgaggcatgggctaacacctgcttgcgcccgctcaccgcgtcgataatcaccgttacattggtggtttcagagccggttccggcggtagttggaatggcaatcagcggcaagcgcggttgcagaacgctggtttctgacatctctgccagcgtgctatccgggttcgtcaccagcaacgtcacggctttcgccgcatccagcaccgagccgccgccaaacgcgatcaccccatcacagcctgactcacgcaactgcgccacggctgcacacacgtcggtaatgcacggttcgcccaccggacatggccagagcgtcatggcgatacctttaacggtcaggctacgcgtcagcccggcggtcatccctgcctgatgcaaaaagctgtctgccatcacgaacagatgtttcagcccacgcgtttgcgcttgctgtccgcaactgctcaccgagcccggaccgcaaagcgtcaccggtggaacgctaaatgtttttacccgttgcagattcagggtatcgaacgcctgaaagagcgcggtctgcaattcattttgcatatagcccctccgctttctctcgcccactactggcgatcgccagcggggtcataaacaaactgtgctgcggtaaatgcacctgtaacgccgggaattgtttgcgaaacagttccgccacgcccggttgcatacaagagccgcccgccagccataaatcagtaatgccctgcccttcaatatgccgggcgacaatgtccgccattttttcgtacaccggtttcaccgcaggccaaatctcttcaccgtgaccgcgcttgtactgctccgcctcttccagcgaaatacggcgatttccggcgagagtcagagagatgtgatgtccgccggtggcttcatccgccgagtacgtcaccttgccctttttcacgatggcaatgccggtagtgccgccgccgatatccactacaccggcgttgtccagttgcagcagatccgcaactgcggttggctcatccagcacatggctcacttccagtccggcagattccagcacgttgatggaaatacgcgggtccgtacctggaggaaatgaagtcgccgcatggctaaaacgacgaccgaattgctgctcgagcgtgtcgagatggcgacgaacaatggtgacagcgccgaagaaatcccagacgatgccgtcgcgaaccacatcggcccagtcgaggcataccgccactggctgaccgtcgcggtcgacaaccatcgacaccacatcgcaggtgcccagatccacccccagccacagcggagattccgtcgcggcgggcgtctggttacacagcgttgccgccgtttgcagacgtggggtgagccattgttcgtcgtgcgccatctgttactccttaaacaatgcgaaacgcatcgactaatacacagcgacgcagacggacaaacgtacgcgcgctggttaccccttcaccggttggcgtggtgatggtcatggtggtccagccttccccgcccagccccagcccggcaatgcacggtccgttcttaacgaaaatgctggtatcaatagcattcgccatctggttcatgttttcgatgttgcgcgagtgcattgccgccgtgtggtggcaaccgccttccagtttcaccgctagcgcaatggcatccgccacgttggcgacgcgcacgacgggcaacaccggcatcatcagttcagtcacggcaaacggatgttctgcggtggtttccacaaacagcaggcgcgtttcttgcggaactttaaggccgattgccgccgcgattttgcctgcgtcgcgaccaacccagtcacggctgacggtgccttttccgcgctcgtcgatatttttcagcaacaccggttgcagctgctgcgcctgttctgcggtcagtttcaccgcgtgctggccttccatcagacgcatcagttcatcggctacgctatcaacaacaatcagtaccttttcgtcggcacaaatgatgttgttatcgaaagaagcgcctttgacgatggactgagcggcacgggcgaggtcggcggtttcatccaccactaccggcgggttgccagcgcctgcggcaatcagacgtttattggtgtgtttacgcgccgcttctactaccgcttcgccgccggttaccaccagcaggccgatacccggaaacttgaacaagcgttgcgcggtttcgatatccggatttgccacagtaaccagtaagttttccggcccacctgcggcaacaatcgcctggttgagcagcgtaatcgcccgctgggagacttttttcgccgccggatgcggggcaaaaatgacgctgttgcccgcggcaatcaggctgatggcgttgttaattacggttgccgccgggttagtggaaggcgtcaccgaagccaccacgccccagggtgcgttttcaattagggtcaggccgttgtcgccagtcagcacttgcggagagaggcactcaacgcctggtgtgccgcgcgcctgagcgacgttttttgcaaatttatcttcaacgcgccccatgccggtttcactgacggcaagttccgctaaatctctggcgtgtttttcgcctgcttcacgaatggcagcaatggctaactggcgcattgccacgctttttaacccttgctgggcgactttggctgccgcaacggcgtcatccagggacgcgaaaacgcccatctcatgaacggcggcggacggcgtgtcactgctttgcattttcagcagtaccgctttcaccacctgttcaatatcctgttgattcatgatgttctgccttatttgtggaaaattacctgaccgccagacaccacctcatcgacaatgccaatcacgcacagatcgaccggtgacgtttcgcttttatgcgcctggcgggcggaactgccactcaccagtaacacccactccccggttcccgcgccaatattgtcgatggcgacggcgcattgcccgtcaggattaccttgtggatcaatcatttccaccatcagcaatttgtcatgcgccagtccgtgatggcgtacggtacaaacaatttgtccagtgacgactgccagtttcatacccgcctccgtggcgtatttcaggtaaaagctccccctaccctccgcagaaggtaaaatgaaaaaggagagagcgtgacgcccgaatcgacgtcacacagggtgattacaggttgctgctatcgcctttcaggccgatcgggaagacttcttccaggtcgccgtgcggacgcgggataacgtgtacagataccagctcgccgatacgctgtgccgctgcggcacctgcatcggtcgcggctttacaggctgcaacatcaccacgaaccatggcagtacacaggccgccgccaatctgcttaacaccaaccagcttgacgcgcgcagctttcaccatcgcgtcagaagcctcaatcagtgcaaccaggccccgggtttcgatcattcctaatgcttccattgtgctttcctctttatcagggtccagaacgggaccgttcattcaaccagtgtttgtaaactgctttcgcggttcacttctgtctgacgcggcacagctgccaccagcgccagctcgataatttcctgcacgctacaaccacgagagagatcgtgcatcggcgcggcaagtccttgtatcagtggcccgacggcacgatatccgccgagtcgttgtgcgattttgtaaccaatatttccggcttccagcgacggaaaaaccatcacattggccttgccctgtagcgggctggcaggcgctttttgcgccgccacttccggcacgaaggcggcgtcaaactgtaactcgccatccaccaccagctttggtgcgcgctcacggacgatttctgtcgcctgctggacgttagcaacacaggggtgacgggcgctaccattgctggaaaacgacagcatcgccacgcgcggctcttctccggtgatggcgcgccaggtttcggcactggcaagcgcgatatccgccagctgcgccgccgtcggctgtggcaccacgctgcaatcggcaaagcccaacgccgggccgctgtactgtggcaacatcaggaaaatggaagagagcgttttacagcctggctgcaagccgataatgcgtaatccggcacgcagcacatttgccgtggaagagaggttgcccgcgatacagacatccgctttaccggcgctgaccattgctgcggcgaacatcagagggtcggtaagtttttccagcgcatccggcggcgttttttcgcccgcgcgggccagccagcgatgagcaaattcttcccgcattgcgaggttgccatgcggatcaatcacctgtagcccgtccatcgccacgccgtgactgagcgcaaactgacgaagttcaaacggattggcgaccagaatgggcgttgccagaccttgttgatgtaaatattgcgcggctttcagcacacgttggtctaacgcatccggaaaaaccactctggcgggcgctcgcaacgccagttcacgacaacgttcaataatcattgcgtttcccccagtcgttgttggatctgcttcaccgttagcggctgcttcgttacgctcaggatcatcatcacgtagaccgtgctcgaaaggcggttcagcgcctgcaaaatgtccgggcgtaatacttcaaagctgcgggtgataaagacctgcgccgctacggtttcggtttcccgcactttggtgcgtagcagattgagcaacgcagcatcgcgcccgtggctggcttccggcaccagatgatcgtggtcgagatagcgcagcggctgatgagaaagccgatgcagatcttcgtcagaaagcccgacaatcgcctggcagcccagcggttcccccagcgcatcggcgcgcataatgttgccaagacgcgaacggatatccgccagccacggctgccacggttccgccagttcaatttgcagccacactgccagcgcaatggtgctgtcgagaaccgcgcgaaaacccagacgcggatcgcttttggcgaccattttttccgccgacaggtgagtcagcgtatccggcttttttgccaccggctggcgacacagttcgcagcacgcctgcggatgttcatcgctactggtcagcccatgaacgggctgcggctgctgctgttcatcgtcaacaaacaggcggccctgctcgtcaataaacttgatgcgcagatggcggctttccagcaactcccgggcagagggcgtcaggcgactgtccgcagggagatggatctctgcgccttcgctgagcgtatggttcgctcttagccatgcttcggtgatgaaatctttcatagggattgccagttagccggccaggcgacatacaggaatttcacgctggatgtcgtaccaaattcgatgctggagcctttcgggataaacatcacgtcgcctgctttggcgatcatggtttggccttcgtggcgaacatgcagctccccttccagcaccatgtcgatttcgtcgtagttcagggtccacgggaagaatgcgttctcccactgcataaaaccggcggccatgctgctgccgtcgtctccggtcacaagatcagtcaagcccacgcaatgcggctctgcgccgtcgaaacgaccaaacttgacgctactgccatcaatcactttgatgccgcctttgccggtcaccgatttgaagctcggctgcattgcgccctgctccagcgactgtttttccttcatcactttttccatcagctgtgcgaccaggctttcggtaaactggccttccggcagctgggcaatgatggtttcgcggatgcgctggctttcggttttgtcggctggcacgctggcgggcacggacgccgttaccgggatcgattcatcacattcggtgatggtaaaacccagtagatccgccacttcacgggcttccggggtaataatgctggcgcgcagaaccacggacattgcctgttcgccgcgcgcgtgtgcttcacgaatatcattcgctgtgatgagttttttcacctgcttcctcctgtttggtgagagatgccagataatccaccagttgctgcacgctttgcgggtcgtggctgtttagctcgaacatcggctcttcgaaacccgtctcaagcaataactttcgcgttgcggcgacgtcagcatctggcatgtccgttttactgatgacggcgatttgccgtttgctgacgccaatatccagcaacccggcaggcaaccgactttccgggtcatttgcgccatggacatagatcagcatgtctacatcctgtagcgtggtaattaaggcgtgataccagcggggatggttaaaatattcacccggcgtatcaatatcgcccttatcattaaattccacggcctgtgtttttctggcgagggtataattcccctgcaacgcattaaataacgttgtttttcctgccccgacgctacccacaaacgcaattcgtttcatgaatgcctcgtattaacttttggtcatttcacaaagcgtataatttaataagcgacctaaaccgctgacggtttgtgataacgcttcttctactgcgcccaccgagccataaatcaccaatgcaccgctgaatcggtcgagaaaaccgatatgcacatcagcggctttcagcgctaaatcaccggcgatcatcgccgtttcgccgggagttagcgtcataatgccaattgcgcccgcatccggaacgccgattttcttcgccagttcctcaccgggatgcgcgatgagatgcgccagtgtgacctgtttgccgggcacaaattcctgaatgatgcgttctttatccatgagtcgccgcctgtgaaaaactttcgtgtatcgtgacaatttttcgtcagagtaaataacaaaattcggcaagcgcgtttaaaaggtgaggtagatcactaagaatggagagatattcgctgtggtgcataaactttcatatgcaacgcatgaatataaataaaataatatcgagatattatatagactgcttttttttattattcgcaaactcagtaataagctttactaatatattgcagctaaactgcttaccctgaatattcagggtaagcgtgagagttaaaaaaaattacagcggttgggtttgcgcttctaccacggccagcgccaccatgttgacgatacgacgcaccgatgcgatcggcgttaacacgtgaaccggtttcgccacacccatcagcaccgggccgacagtcacaccttccgagctggaaacacgcagtaagttgtaactaatgcgggcagcttccatgttcggcatcaccagaatattggcggaacctttcaaagagctgtccggcatacggtcgttgcgaatcgcttccaccagcgctgcatcgccgtgcatttcaccatcaatcatcagttctggtgcacgttccctgaccagttccagcgcctgacgcattttgctcgacgacgggcagtcagaagaaccaaagttggagtgcgacaacaaagcaacgcgcggctcaataccaaaacgacggacagtttctgccgccatcaaggtgatctccgccagctcttctgcatccggttcatcattaacatatgtatcggcaataaaggtgttaccactcggcagcagcagcgcgttcatggcacctgcggtgtgaacgccatcgcgataaccaaagacatttttcaccacgctaaaatgttcatgataatcacccaccgtaccgcaaatcattgcatcggcttccccacgctgaaccatgatcgcgccgatcactgtcgggttactgatcagcgcccgctgcgcctgttcctgagtgacgccgcgacgcttcatgatctggaagtattcggtccagtactctttaaagcgcggatcggattcgttattgacgatctcaaaatcaacgcccgctttgatctgcaagcccagtttctgaatgcgcatttcgatcacgttcggacgaccgataaggatcggtttcgccagtcccagcgttaccagttcctgagtggcatgcagaacgcgcgcctcttccccttccggcagaacaacgcgcttcggcgctttgcgagcctgggagaaaatcggcttcataaacaggttggttttgtaaacgaactcagtcagcttgtcgatgtagacgtcgaaatcagcaatcggacgagtcgccacgcccgactccatcgcggctttagcgaccgcaggagcgatcttaacgatcaagcgcggatcaaacggttttggaatgatgtattccggaccaaagctcagatcctgatcgccatacgctgaagccaccacttcgctctgttccgcatgggcgagttctgcaatcgcacgtaccgccgccagtttcatctcttcgttgatggcggttgcgccaacgtccagcgcgccacggaagatgaacgggaagcacaggacgttgttcacctggttcggatagtcagaacgaccggtgcaaatgatggcatccggacgcacttctttcgccagcggcggcagaatttccggttccgggttcgccagcgccaggatcattggcgcacgagccattttcttcaccatttcctgggtcagcactttcgggccggaacagcccaggaaaatatccgcgccttcaatcacatcatcgagggtacgtttgccgtcatccaccaccgcatatgcggctttggtttccgccatgtttggctcacggccctgatagataacgccttttgaatcgcaaaccacgatgttatgtttttgcagacccagcgctaccagcaggttcatacaggcgattgctgcggcacccgcgccggaaaccaccatccgcacgtcggagatgtttttctccaccacgcgcaagccgttgaggatggcggcagtgctgataattgccgtgccgtgctgatcgtcgtggaataccggaatattcatccgctcgcgcagtttctgttcaatatagaaacattctggcgctttaatgtcttcgaggttgatgccgccgaaggttggttcgagcgcggcgacaacttcaataaatttgtccgggtcgagttcgtcaacttcaatgtcaaatacatcaatcccggcgaatttcttaaacagaacgcccttgccttccatcaccggtttgcctgccagcgcgccaatgttgcctaaccccagcaccgccgtaccgttagagatcaccgccaccaggttacctcgggcggtatatttgtaggcttttaacgggtctttttcgatttcaagacaaggtgcggcaacgcctggtgagtaggccagcgccagatcgcgctgtgttgccagaggcttggttggagaaacctggattttccctggaactggaaattcatggaaatcaagtgcactttgttttaactggtcatccatttggttgttcctttcacgtaacgttcacaaataaagtgtgtgggcaacagcccctgcccacaacgtggcgcacattattaccctgccggagtctacagactttgagcaagtccaaactctcaccattaatataatgttttggtaataatcctataacactgatgttacctgcttaatccagcaataccatgcctgtctgctatgcttttttgatgcgtttagcgaaatttctcagaagtgtgaattaacgcactcatctaacactttacttttcaaggagtatttcctatgaacgagttagacggcatcaaacagttcaccactgtcgtggcagacagcggcgatattgagtccattcgccattatcatccccaggatgccaccaccaatccttcgctgttactcaaagctgccggattatcacaatatgagcatttaatagacgatgctatcgcctggggtaaaaaaaatggcaagacccaggaacaacaggtggtcgcagcgtgtgacaaactggcggtcaatttcggtgctgaaatcctcaaaatcgtacccggtcgcgtgtcaacagaagttgatgcacgcctctcttttgataaagaaaagagtattgagaaggcgcgccatctggtggacttgtatcagcaacaaggcgttgagaaatcacgcattctgatcaagctggcttcgacctgggaaggaattcgcgcggcagaagagctggaaaaagaaggtattaactgcaacctgacgctgctgttttcttttgcacaggcacgggcctgtgcggaagcaggcgtttttctgatttcgccgtttgtcgggcgtatttatgactggtatcaggcacgcaagccgatggacccgtatgtggtggaagaagatccgggcgttaaatcggtgcgcaatatctacgactactataagcaacaccactatgaaaccattgtgatgggcgcgagcttccgtcgcaccgaacaaatcctcgccttaaccggctgcgatcgactgactatcgcaccgaatttactgaaggagctgcaggaaaaagtttcgccagtggtacgtaaattaatcccaccttctcagacgttcccacgcccagctcccatgagcgaagcggagttccgttgggagcacaatcaggatgcgatggcggtagaaaaactgtctgaaggcattcgtctgttcgccgttgatcaacgcaaactggaagatcttcttgccgccaaactataaaccagccacggagtgttatatgtcccgaaaagaccttgccaatgcgattcgcgcactcagtatggatgcggtacaaaaagccaactctggtcatcccggcgcgccgatgggcatggctgatattgccgaagtgctgtggaacgattttcttaaacataaccctaccgacccaacctggtatgatcgcgaccgctttattctttccaacggtcacgcgtcgatgctgctctacagtttgctacatctgaccggttacgacctgccgctggaagaactgaagaacttccgtcagttgcattcgaaaaccccaggccacccggagattggctatacgccaggcgttgaaaccaccaccggcccgcttggacaaggtttggcgaacgccgtcgggctggcgatagcagagcgtacactggcggcgcagtttaaccagccagaccatgagatcgtcgatcacttcacctatgtgtttatgggcgacggctgcctgatggaaggtatttcccacgaagtctgttcgctggcaggcacgctgggactgggcaagctgattggtttttacgatcacaacggtatttccatcgacggtgaaacagaaggctggtttaccgacgatacggcaaaacgttttgaagcctatcactggcatgtgatccatgaaatcgacggtcacgatccgcaggcggtgaaggaagcgatccttgaagcgcaaagcgtgaaagataagccgtcgctgattatctgccgtacggtgattggctttggttcgccgaataaagcaggtaaggaagaggcgcacggcgcaccactgggggaagaagaagtggcgctggcacggcaaaaactgggctggcaccatccgccatttgagatccctaaagagatttatcacgcctgggatgcccgtgaaaaaggcgaaaaagcgcagcagagctggaatgagaagtttgccgcctataaaaaggctcatccgcaactggcagaagagtttacccgacggatgagcggtggtttaccgaaggactgggagaaaacgactcagaaatatatcaatgagttacaggcaaatccggcgaaaatcgctacccgtaaggcttcgcaaaatacgcttaacgcttacgggccgatgctgcctgagttgctcggcggttcggcggatctggctcccagcaacctgaccatctggaaaggttctgtttcgctgaaggaagatccagcgggcaactacattcactacggggtgcgtgaatttggcatgaccgctatcgccaacggcatcgcgcaccacggcggctttgtgccgtataccgcgacgttcctgatgtttgttgaatacgcccgtaacgccgcgcggatggcggcactgatgaaagcgcggcagattatggtttatacccacgactcaattggcctgggcgaagatggtccgacgcaccaggctgttgagcaactggccagcctgcgcttaacgccaaatttcagcacctggcgaccgtgcgatcaggtggaagcggcggtgggctggaagctggcggttgagcgccacaacggaccgacggcactgatcctctcaaggcagaatctggcccaggtggaacgtacgccggatcaggttaaagagattgctcgtggcggttatgtgctgaaagacagcggcggtaagccagatattattctgattgccaccggttcagagatggaaattaccctgcaagcggcagagaaattagcaggagaaggtcgcaatgtacgcgtagtttccctgccctcgaccgatattttcgacgcccaggatgaggaatatcgggagtcggtgttgccttctaacgttgcggctcgcgtggcggtggaagcaggtattgccgattactggtacaagtatgttggtctgaaaggggcaattgtcgggatgacgggttacggggaatctgctccggcggataagctgttcccgttctttggctttaccgccgagaatattgtggcaaaagcgcataaggtgctgggagtgaaaggtgcctgatggtgattgccggatgctgattgccggatgcgacgctgacgcgtcttatccggcctacagcgtcttatccggcctacatgtcccgccattttgtttaacgggtgatccacaacgtgggccaggcgtctggcccatgccagttatcgcaggtgggttctgcggcgtaacgcaccaggcgaaaacgctgaccgtcaaagcgccagcgcgcctgaatgccacaatcgcttaatccgcgccctttcgctaaggtcaccagttcacgcgatttctcatcaaatgttgcgttcatcagttccagttcattcgtctcctgaccgttgttgaacggcaaacgcaaccgaaccgggcgcgaagctagtggctttttacgcgacacaatccatgccaaatcaatggtgttataggcccctgcctcacagctaatcatcatcagcgctttatcatcagtcagcgcagtgacattcacctcacgacgcaatggatcaagcgagcagcgcagaccattcatccgccagtttccataatccagcaaatcgttgcgttcttcgagtgagagtggcgtcggcgttgggttaaccaccgcgacctctttcagcgcaggcgcgggcggtacgctgagcggcggttcgtcccctttcttgatccacgcggtttcactgccaacgcgcttttgctgagcatcaataaacaacaacgctgcttttaagccactcagagaaatggtctgatcgccatcgcgtaaggtgattgccttcccttcctgaatcatctgcaaaaacgcggtgatggttgccgtatcatcggttactaataaccatggtgaaatccgccacttgtcaccacttaacgccaacggctcgccatctaacagcagccgtggcgctatctccccttctgacgcctccggcgacttcaatccgccgcgctcaatacgtaaaacggcatcggtatgcgccccggcgctgcggctcagggtcatcaccagtccattatgatcgcccgtattacgcgccacgcagaaattttggttattacaggtgacctgccagtcggaaaacgcccgttgcgctggtgccgcccacaccaaagacgtcggcaacaaagcgaaaaaaaagagaaggaaaatgcgatagcgcatggacggtacgaccccagaagttcaaacaaacagcacaagtcgtatcttcgttgcgcaggtagcgcggctcaatcggatttgtcggattgagccaataataaacaacgaaatattattgttatttttcagtccattaaatgtgacgtttgcaaatagttaagcaataacaccgtcttaccgtcacgtatctcgccggttttgatcatctccagcgcctggctgaacggcagctcgagcacttcaatatcttcatcttcgacaccgccaccggcgttagcgcgctgattgtcactgtattcggcgataaaaaagtggattagctcagtcacaccgcctggcgacatatacagttcaaataatttgcgcacttcacccacttcatagcccgtctcttcaatcgcttctttgcgaatacacacttccggttcgtcgttatccagcagcccggcgcagctttcaatcagctgcccgctttcattgccattaacccaggtagcgacacggaactgacgaatcagaaccacggtctttttcttcgtgttgtacaggaggatcgtcgcaccattgccgcgatcgtacacttcacgtttatggcggataacttcgccgtctttgcgcgtgagatcgtaagtaatgttgtgcagggtgaaatagttatcggagagaattttgtctttaatgagggtgatttgttgcgtcataccgactccacagcgcgaaatgaacaattatcttacgctgtgaagtcgggtttgtctgcgcaggctatcagtgagatttgactgattttacccccagccagtcaataatcccctgtgccgcatgacgtccttctgccattgcggtaaccaccagatccgcaccacgcacggcgtcaccaccagcgaagattttcggattggtggtctggtaacggtactggctttccacatccgcgatgatgcggccccatttgtctaccgttacaccgtgcgactccagccacggcatcccgtgcggattgaagccaaacgccataatcaccgcgtcggctggcatgacaaattcactgccttccaccggcactggacgccgacgcccctgggcatccggctctccaagacgcgtgcgcaggaaacgaatcccgcagacgtgaccttgttcattcagctcaagcgccaccggctggacgttaaattcgaagttggccccctcttcgcgggcgttcttcacttctttcttcgagcctggcatgttagcttcatcacgacgataagcgcaggtgacgttactcgcgccgtggcgcagtgcggtacgcacacagtccatcgcggtgtcgccgccgcccagtaccacgacgttaagtccggcggtattgataaacggctcttccggtagctcttcgagccccatcacctgtttagtgttggcaatgaggaacggcagcgcgtcataaacgcccggcgcatcttcattgggtaaacccgctttcatggaacggtaagtgcctacgccaacgaagaccgcgtcgtattgttccaaaagcgaatccaaagagacatctttacccacttcacaattgagttcgaagtgaatccccatcgcgctgaagatttcccgacggcgtgccagcagggatttatccagtttgaaagaaggaatgccgaaagtgagcaagccaccgatttctggatggcgatcgtacaccgtcacccccacgccattgcgggtcagaacatccgcacaggccagccctgccggacctgcaccgataatcgccacccgcttgtccactttggtgacatggcttaagtcaggacgccaacctttcgccaacgcctgatctgaaatgtagcgttcaatgttgccgatagttaccgcgccgtgctcatcgcgaatagtacaggcaccttcacacaaacggtcttgcggacaaacgcgtccggtaatttccggcagggtgttggtctggtgagaaagctcgacggcggcgtcgatgtttccggctttcaccagttcaatccactgcggtatatggttatgcagcgggcaggtccattcacaaacgctgtgctcgccgcacttaaggcagcgcgaggcttcccgttgtgcctggtcggcgcgaaatggcagataaatttcatcaaaaccggttttgcgcgcttcaatcgccagtttatccggctcgccacgcgcgggcgttgcctgcatttgttcgactttactcattaccggcatttcttgcgccgcggtactggcatgccacggttgatgttcctgacgcgcggtgcgcaagcggcgggatttcgccatgccggagagtgcgacgtcagtgaccagttgcagcgcgtccgccgggcaattctcaacacaggcaggaccgttttcgcgccccgcacaaaggtcgcatttatgcgccgtggcttttacttttcctgccgcgacgggtgtcaggacgatttgcatcgtaccaaaaggacaggccaccacgcaggatttacagccaatacacttttgctgattgacctgaatgctgtcatcaacgtggctgattgcgccattagggcagctacgggcgcagggcgcatcttcacaatggtgacaggtcactgcactacgttgctgttgatgtttgataaccgtaattcggggatgaaaatggtgttggctcaggacatgttgctcatcattgtgagccatgacacaggcgatttcacaagcatgacaacccagacattgctgactgttggccataataaaacgattcataacgaccttcttttttggttgtaaaaaccttattctttatatgagtgttgttattacccgacttacaggggaatcggcaatgttcatgtgcccagaataagtaactatttcgctataaactgtggcagatcaaataatcccatcactgactaaattgcgtttcagcgaactggaacattaatgattttttgtggagaagacgcgtgtgattgttaaacgacccgtctcggccagtctggcccgggcctttttttacattgtgctgctgtcgattctttccacgggtatcgctctgctaactctggcgagcagtttgcgcgacgctgaggctatcaatattgccggatcgctgcgtatgcagagttaccgcctgggctacgacttgcaaagtggcagtccacaactcaatgcacatcgccagttatttcagcaggcactgcattcaccggtattaaccaacctcaacgtctggtatgtgccagaagcagtaaaaactcgctatgcgcatctgaatgccaactggctggagatgaataatcggctcagcaagggcgatttgccgtggtatcaggccaatattaataattatgttaatcagatagacctgttcgtactggctttacagcactacgctgaacgcaaaatgctgctggtggtggcgatttccctggctggcggcatcggtattttcacgctggtcttttttactttgcgccgcatacgccatcaggtggttgccccgctgaatcagctggttaccgccagtcagcgtattgaacacgggcagttcgactcgccgccgctggataccaacctgccgaatgagcttggtctgcttgcaaaaacctttaaccagatgtcgagcgagctgcataaattgtaccgttcgctggaagcgtcagtagaagaaaagacccgcgatctccacgaggccaagcgtcgtctggaggtgttgtatcagtgttcgcaggcgctgaacactagccagattgatgtgcattgtttccgccatattttgcagattgttcgcgacaatgaagcggctgaatatctggagttaaatgtcggtgaaaactggcggattagcgaagggcaaccaaacccggaattgccgatgcagattttaccggtgacaatgcaagagacggtttacggcgaactgcactggcaaaatagtcacgtttcatcatcagaaccgctgcttaacagcgtttcgtcgatgctgggacgcggtttgtactttaatcaggcgcagaagcattttcagcaattattgttgatggaagaacgtgcgaccatcgcccgcgaattgcacgactcgctggctcaggtactttcttacttacgtatccagttgacgttactgaagcgttcgataccggaagataacgccaccgcacaaagtatcatggccgatttttcccaggcgttgaatgatgcttatcggcagttacgcgagctgttgactactttccgcctgacgctgcagcaggcggatctcccctccgcattgagggaaatgctggatacgttacaaaatcaaaccagcgccaaactgaccctcgactgccgtctgccaaccctggcactggatgcgcaaatgcaggtgcatttgttgcaaattattcgcgaagcggtgctgaatgcgatgaagcacgccaacgccagcgaaatcgccgtcagttgcgtcaccgcgccggacggcaatcacacggtttatatccgtgataacgggattggtatcggtgaaccgaaagaacccgaaggtcattatggtctgaatatcatgcgcgaacgcgcggaacggctaggtgggacgctgactttttcacaaccttccggcggcggcacgttagtgagtattagctttcgctctgcggagggtgaggaaagtcagttaatgtaatgcctcctactgaccaaagaatacttgcacttaaggttcagtataaaagggcatgataatttacattaactcctttttttctccacgattggctcgtaccttgccgctacagtgaagcaagtcaagcctacaacgatacgcagaaacacgaggtcctcttttaatggcgaatttctttattgatcgaatttttgcctgggtgctgaattaataataactgacaggtaccctggcgattttttcattgcccgttgaacaataccccgatctcgcgccaccgaatgtgcgagtgaccgctaactatcccggcgcatcggcccagacgctggaaaacaccgtgacccaggttatcgagcaaaatatgaccggcctcgataatctcatgtatatgtcatctcagagcagtggcaccggtcaggcatctgtcactttaagttttaaagcaggcaccgatccggacgaagccgtgcagcaagtacaaaaccagctgcaatcagccatgcgaaagttaccgcaggcggtgcaaaatcagggcgtgacggtgcgtaaaaccggcgataccaacattctgaccattgccttcgtctctaccgatggttcgatggataaacaggatattgctgattatgttgccagtaatattcaggacccgttaagccgcgtgaatggcgtcggggatatcgatgcctatggttcgcaatattccatgcgtatctggctggacccggcgaaactcaacagtttccagatgacggctaaagatgtcactgatgccattgagtcacagaacgcgcagattgcggttgggcaacttggtggtacaccttccgtcgataagcaggcgctcaacgccaccattaacgcccagtcactgctgcaaacaccagaacagttccgcgatatcaccttgcgggtcaatcaggacggctcagaggtaaggctgggcgatgtcgccaccgtcgaaatgggggcggagaaatacgattatcttagccgcttcaatggtaagccagcctccgggctgggggtaaaactggcctccggcgctaacgaaatggcgacagcggagctggtgctcaatcgtctcgacgagctggcgcagtatttcccgcatggactggaatacaaggtggcgtatgaaaccacctcgtttgttaaagcctccattgaagacgtggtgaaaacgctgctggaagctatcgctctggttttcctcgttatgtatctgttcctgcaaaacttccgcgccacgctgatacccactatcgccgtgccggtggtgttgatgggaaccttctccgtactttacgccttcggttacagcgtcaacaccttaaccatgttcgcgatggtgctggcgatcggtctgctggtggatgacgccatcgtggtggtggaaaacgtcgaacgtattatgagtgaggaaggactcactcctcgcgaagccacacgtaaatcgatggggcagatccagggggcactggtcgggattgcgatggttctttcggcggtatttgtaccaatggccttcttcggcggcaccaccggtgccatctatcgccagttctctattaccattgttgcggcgatggtgctgtcagtactggtagcgatgatcctcactccggctctgtgtgccacactacttaagccactgaaaaaaggtgagcatcatgggcaaaaaggcttttttgcctggtttaaccagatgtttaaccgcaacgccgaacgctacgaaaaaggggtggcgaaaattctccaccgtagcctgcgctggattgtgatttatgtcctgctgcttggcggcatggtgttcctgttcctgcgtttgccgacgtcgttcttaccgctggaagaccgtggcatgtttactacctcggtacagttgcccagcggttcaacgcaacaacagaccctgaaagtcgttgagcaaatcgagaaatactacttcacccatgaaaaagacaacatcatgtcggtgtttgccaccgttggttctggccctgggggtaacgggcaaaacgtggcgcgaatgtttatccgcctgaaagactggagcgaacgcgacagtaagaccggcacctcgtttgccattatcgagcgtgcaacgaaggcgtttaaccaaattaaagaagctcgcgttatcgccagcagcccgccagcaattagcggtcttggtagttctgcaggttttgatatggagttgcaggaccacgctggagcgggtcacgatgcgctgatggcagcacgtaatcagttgctggcgctggcggcggaaaacccggagctaacccgtgtgcgccataacggcctcgacgacagtccgcagttgcagattgatatcgaccagcgtaaagctcaggcgctgggcgttgctatcgacgatattaacgacacactgcaaaccgcctggggttcgagctatgtgaatgactttatggatcgcggtcgcgtgaagaaagtctatgtgcaggcagctgcgccgtatcgcatgctgccagatgacatcaatctctggtatgtccgaaataaagatggcggcatggtgcccttctctgctttcgcgacctcacgctgggaaacaggctcgccgcgtctggaacgctataacggttattctgcggttgagattgttggggaagccgcaccgggggtcagtaccggtacggcgatggatattatggaatcgttagtgaagcagctgccaaacggctttggtctggagtggacggcgatgtcgtatcaggagcggctttccggcgcgcaggctccggcgctgtacgccatttccttgctggtggtattcctgtgtctggctgcgttgtatgaaagctggtcggtgccgttctcggtaatgctggtcgtgccgctgggggtaatcggcgcgctgctggcaacctggatgcgcgggctggaaaacgacgtttacttccaggtgggcctgttaacggtcattggtttatcggcgaaaaacgccatcctgatcgtcgagtttgctaacgagatgaaccaaaaaggccacgacctgtttgaagcgacgctccacgcctgccgtcagcgtttacgcccgattctgatgacctcgctggcatttatcttcggcgtattgccaatggcaaccagcacgggtgccggttccggtggtcagcatgcggtgggtactggcgtaatgggcgggatgatttcggccactattctggctatttacttcgtgccgctgttctttgtgctggtgcgccgccgcttcccgctgaagccgcgcccggaataagcaataaaaaaggcgacatgccaatgtgtcgcctttttcaactttccgattaagaacctgctcagcgggttcttgctgtttgtactttgtctcaggaattacttacgaagcataacttcgataaagtctttccagttccccagttcacgttcaatcataacaacctctcttataattatgggtattctacggaaacaatataccgtggtgaagctaatttactcgattgctgcgatgactacctccgggggacaaatcttatgtaaatactatggtcctgcggtgatgatttgtatgtgatacacagcaacatttcgagatattcatacggcatctaatactgatttaattctggttaaaatacagacagataacaagatgaatattcttaatgtttacgttaaaaatgtttaatattatttaatagttgttaatttgaatacttcgataatgttatatttcctgataatcatttgcaggcaaaatgttttcacccttaaatgagtatttattctcataaatcgaaaaaggattcattatggttacactttacggtatcaaaaattgtgacaccattaaaaaggctcgccgttggctggaagccaataacatcgactatcgttttcatgattaccgcgtcgatgggctggacagcgaattattgaacgattttatcaacgaattaggctgggaagcgttactcaacacccgtggtacaacctggcgtaaactggacgaaaccacccgcaataaaatcaccgatgcggcctctgcggcggcattaatgactgaaatgcctgcaattatcaaacgtccattgctctgcgtgcccggtaagcctatgctgctgggtttcagtgattccagttatcagcaatttttccatgaggtgtagtctatgtcgtgcccggttattgagctgacacaacagcttattcgccgcccttccctgagtcctgatgatgcaggatgccaggctttgttgattgaacgtttgcaggcgatcggttttaccgttgaacgcatggactttgccgatacgcagaatttttgggcatggcgtgggcagggtgaaacgttagcctttgccgggcataccgacgtggtgccgcctggcgacgccgatcgttggatcaatcccccgtttgaacccaccattcgtgacggcatgttattcgggcgcggtgcggcagatatgaaaggctcgctggcggcgatggtggtggcggcagaacgttttgtcgcacaacatcccaaccatacggggcgactggcatttctgatcacctctgatgaagaagccagtgcccacaacggtacggtaaaagtcgtcgaagcgttaatggcacgtaatgagcgtctcgattactgcctggttggcgaaccgtcgagtatcgaagtggtaggtgatgtggtgaaaaatggtcgtcgcggatcattaacctgcaaccttaccattcatggcgttcaggggcatgttgcctacccacatctggctgacaatccggtacatcgcgcagcacctttccttaatgaattagtggctattgagtgggatcagggcaatgaattcttcccggcgaccagtatgcagattgccaatattcaggcgggaacgggcagtaacaacgttattccgggtgaactgtttgtgcagtttaacttccgcttcagcaccgaactgactgatgagatgatcaaagcgcaggtgcttgccctgcttgaaaaacatcaactgcgctatacggtggattggtggctttccgggcagccatttttgaccgcgcgcggtaaactggtggatgcggtcgttaacgcggttgagcactataatgaaattaaaccgcagctactgaccacaggcggaacgtccgacgggcgctttattgcccgcatgggggcgcaggtggtggaactcgggccggtcaatgccactattcataaaattaatgaatgtgtgaacgctgccgacctgcagctacttgcccgtatgtatcaacgtatcatggaacagctcgtcgcctgatgagtggttctgcaagaggaaataagcatggactggctggctaaatattggtggattctggtgattgtctttttggtaggcgtcctgctgaacgtgattaaagatctcaagcgcgtcgaccataagaaatttctcgccaacaagccggagcttcccccgcatcgtgatttcaacgataagtgggacgatgacgacgactggccgaaaaaggatcaaccgaagaagtaagctgagtgctcaaccgtaggccggataaggcgttaacgccgcatccggcaatggtgaacgatgcctgatgcgacgctcacgcgtcttatcaggccaggtaatctgtcttttacatcatttcaatcacatcatcatcgccaggcttaccgccacttagcgcttcgtcgaaataatgtttcggaatggtataacgcaagtgatccagggcaaattgcatactgcgattgtcgatcgcatggcctaaatcctccacgatatccagcgtcacgtcaccaccggcactgattaacgcttcctgcgccgcaaccgcatgcgccagatcgataaccggatcttcaccgccatgaatcaggtgaattgtcgtggctgtagacgcagtttccggcaggctcgcatagcgtccgttaaaagcaatgacgcgtgaagcaaggcccggttcggctttaatgctctccagcaccataatcgcgccttgagagaaaccgatgagcgccgtggcgttagcccctactccgctctgtttctgccagtagcgcaccgtttcaataaacgtcggcatgatcgcatccacacgcgcctggcgattatcttccgtaataccctgcaccgaaaaccactgacgccccgccggattaccgctcggctccgcgccaccgacactcaccaccagcgcatcaggaaacagcggtgcaaaccagttgcctatttcccccattgccaccgggttatccccgacaccgtggaaaagcagtaacaactgttgcgcaggtttatccgggctttgaacaacaaaatggtcatgtttcatggcgaactccttaactgatgtcattaattttacgccgctgactcacaatgaccatgagataaaattgaaggagtcagtgaaataattgccattgcgttatgcgatcgcgcagacgctcagtgcgaacatcattaagtgcgaacagcgcctgcgcggcctcttcccgctgacggaccagtaacatcttgcggcctgaaagtttaagtgtggtacataactgcgcatcactggcgtttttctgtaaacgcccacgcagcgccggtaatgccagttcactggtttgtaacagacgcaataagcaacctaacgacgttaatagcggacgatgagcgaaagcaaaaccggccagttcaagccagtcgtcgtcagaaaggacggcatcgtttagtggatcaacaggaagcgtttcgccattccactgcgcgagagcttgcgcatcgcgacgtaaacggtaatgctcacgttcagccagctgtttacccgcatcactcatcggtaacagcgccatcgccgtatagcaaccgctgctggcttcccgatgattacccatccgcaccagcacaaaaccgcagcgttgccagaaacgccataactccccggtgtaaccaaaactcaccgaaagatagtcgaggtcttgcgtatattgcaaagcaccagcaataagttgccgccctgtgccttcccgctgacgagccggatgaactgctatccggctgacccgccgtccacgcaatgtcgccgccagtggattgttgccgtgcgccgccagcgactgggccaccagattaccccgcgggcgacgaaaacctgcccataccgcctgactgagttgttgagataatccaccctcatccaccagccacagcgccccggcaatctcgttttcgccagccgcctgtaaaaaatgttgccctggtgcatccatcatccggcgtaaatccagcggcgaagtccgatagtgcgcaccagacaagagctgataaacctttaacggcgtttctggatcgctttgccataacgtctgttcaaatgcggaaatgacaatattgccttgtggtgtatgggtgaagttttcatcgtcaaaaaccagtgcctcgctgaccattttttccagcgggcatccctgcgcccagcggatcggctgttgcagttcaaaacggtgtaaatgcggaaagcgagcgcaaaatttcagcaaaaaaccacgtccggtgccttcgtagccctgcaccgtagtggttaacaacgttcgaggaaaacgcgataccagttgatgcaacaatggcgcaggtatggctgcggcttcatcgaccaccagccagtcggcttgctcatcgctggctaacaaggcatccggcgcaataaagcgaaacttctcgcccgcaaattgtgccagtacatccgttgacgcttttgcgggcgcggtgacaatcgctctgcccgcaatacgagaaatgagttgccctgccaacgccgacttaccgcgcccacgcgcagccgttaccgctgccacgcccggcggcatggtcattagctgctttaagagttgctgttgttctggttgtggtgcgccagtcgcggggtaccagtcagtacggggagtaaaatgcgccaacgagaatggctggttttgccgccagaggatagcctcgttatccgccgtaagtacgcgtttgagatgctggacaaaatgcggcgtcgcaatagggtcagggcaatcactccagcgcagcgagtcggcatcaggttggttttcccactcttcccatacagggagtaacaaaaccagccagcttcccgctttcaacgttccgctaagtgcggcaaaggcagcggcatcaaagccgtggcgggcgtcgaataccgcatgccggaactcgcgcccaagtaaagtttgtagtgccgagggagaacagtggttttcagcatctggccgcggcgaaatccacagccagtcgccaggtaaggcatcacgcaacttaagagtatgctcaaaacaccaaccctcttccccgctcaacaccagcaagcggcggatcccttcacgtttcatttgcgctgttaatgtgtgaagcgcagtcagttcagccatccctgccccggaagttaaatgcttttaccaaaagtattgcattgtgccggatcgccgctgtcgaaaccacgtttaaaccagctgtagcgttgctgagaagtgccatgagtgaaactgtctggtactactcgcccctgactttgctgttgtaaacggtcatcgccgatggcctgcgccgcgttcagcgcctcttccagatcgccggtttccagaacgccttgctgctgcatactatgcccccagacaccggcaaaacagtcggcctggagttccatacgcacagataagcggtttacttccgcctgcgtcgcgttttgttgcagttgacgaactttcggctcgatgcctaacagtttctgcacatgatgaccgacttcatgggcgataacgtacccctgggcaaaatcgccatccgcgccaagtttgtctttcatgtcatcatagaaggagagatcgatataaaccgtgccatccgccgggcaatagaacggccccattatggactggcccgccccgcagccggtacgcgtcattccacggtacatgaccagcttcggttgctgataggtcttacccatcttctcgaactgttgtccccaggtgtcttccgtggttgccagaatcaccgaggtgaattttgcggcttcgtcttcatttgggctaattgaccgcgttgattgttgttgggaaaccggctgcccggtcatcaacccggttaaatcaacaccatagtagcctgcaaccagcacgactatcagtaaaatcagcccgcctttaccgcttggcaggcgaaaaccgggaccgcccatagatggaccaccagagctgttgcgcctgtcttcaacattgtcactttcacgtcgcccttgccaacgcatagatacctcaacaatatattcattatagaaatgatcgtaggtggttcagaggaagattaccacaggaaagcgggatgaaatggcggaggaatgagcgttcaatgcatatattccgagagcggttgtcttgccgtgccagctgcacggcaagatgatgaacagaaaaatcagtccagctgtacacccaggcggcgggcgacggcttcataggcttcgatcaggccaccgaggctctggcggaaacggtctttgtccattttctccagcgtttctttgtcccacaggcggctaccgtccggggagaactcatcacccagtaccacttcgcctttgtacagaccaaattccagcttgaagtcgaccagaatcagaccagcatcatcgaacagttttttcagcacgtcgttcgctttgtaggtcagctctttcatacgcgccaggttctctttgctcacccagccaaaggtttcgcagtaagattcgttgaccatcggatcgtgcatggcgtcgtttttcaggaacagatcgaacagcggcgggttcagctcaataccttcttcgattccaagacgtttcaccagagagccagcagcacggttacgcacgacacactcaaccggcaccatatccagctttttcaccagacattcggtatcggagagcagacgctccatttgagtcgggatacccgcttcagccagtttgctcataatgaagtagttgaacttgttgttcaccatacctttgcgatcaaactgctcaatgcgcgcgccatcccctgctgacgtatcattgcggaattcgagcaccaacaggtccgggttttccgtgctgtatacggttttcgctttaccacgatacaactcagcttgcttttgcatctttatcactcctgggtgtgaattaacgttttaaaatcttttgctgtctggtgtgccggatgttttgtcggatgcggcgtgaacgccttatccgaactacgtccgacaaacaaatttcgtgcgaattaccgctaaaatcgcgttttcctgcagacgcacacgtttgcgtatcatatcagaaaaaagggccggatgattccagccctgtatttttacttgctaaacgcagcctggaagacagctaccagcgcgtcgttctgactctgagtcagagtatgacctttcggatcgatgaactgtaggctgctgcggttatctaaatcgccaacctgcagtttatagtcaccggatgccaggcctggatcgctcgcgcccagttcctgccagtcgctgtcagacagcggcttataagttacggccatgttgccctgcgaacgggtgctgtcggtcactttcatgcccactttttccagcgccgctggcagacgttgccaaaccacattgaacggcccgcgtacgaccagcattggtaaaccggtgtcatcagctgcactttgtacgtccatagtggtggaggcacgattttgcgcagcgttcgcggcgtcagtggcagatttatccagaccggcggaaataacgttcatcatctccgtgctgtaacgctgcatggaagccgcgtctgcaaccggtttgcccgcctgttccaggttcagcagtttaaccgtaaccgcctgctgataaccctgcggcttaacagagatttgataacgaccacgatactgctcgtcttcgtccagacggttccattgtacccaatcggtggtcagtgtctgaccagcatcatcacgttgggtgatggtgtagtttttcgcctgcagcacgctaaccacctgcggccacagagtattgccacgaccattttccaccagcaatgaagcggtatcgcccgtgaactgggtacgcgcgccagaaaccagtgccagcggctgggctggtggacgaatgtccagcgccttaccgacagcaccactaccgttggtcaccgggattgcataatcaccggaggtcaccggcaaaatcattccagccggggcatgaagctccgcaagcggtgccgcttccaggtaggcttcatcaccactgacctgacgcttatagcgtgagtcagaactacaggcagcgagtaataaaacaagcgaaacacccgcaacctttgccaggcgcgacttttgaacagagtaagccatcaaatctccctaaactttacagcaaaccggcatgcttaagcgccgctctgaccgtctcacgaccactgtcggtgattggtgtcattggcaggcgcagcgtatcggtcgccacaagacccagttccttacatgcccatttcaccgggattggattgggttcgacaaatagtttgttgtgtaatggcatcagacgctgattaataacgcgtgcctcggcaaaatgcccttctgctgccagtttgcacatctgggccatatcacgcgctgcgacgttagccgtaacggaaataaccccatgaccgcccaattgcatgaagtccagcgcgctcgcatcatcgccgctcagcagaacaaaatcatctgaaaccagctctttgatctggtttacacgcgttaagttccctgttgcctctttgattccgataatattttttactttcgccagacggcccaccgtttccgggagcagatcgcagccagtacgggacggcacattatacagaatttgcggcaggtcagtatgctcagcgatggctttgaaatgctgatacaaaccttcttgcgacggacgattgtagtaaggggttaccgtcaggcagccgacgataccactgtcattgaagcgctgcgtcaggctaatggcttccgcagtagcgttagcgccggtcccggcaattaccggaatgcgcccatcagccagatccagcgtcatcatcaccacatcagcatgttcgtcatgatttaaggtagcggactcgccagtggtgccaacagaaacgatcgccgaagtaccgctggcgacatgataatcaatcagttttttcaagctagcccgacagacattacctttttcatccatcggagtaacaatcgcgacaatacttcccgtgaacatgggccatcctctgtgcaaacaagtgtctcaatggtacgtttggtatggcattaaaagcaagcagacagaaccgttctgattgttgtatgcatgttttttttatgctttccttaagaacaactcaccccttaaaggaataaccagtttgacactgtcatcgcaacattatctggtgatcactgcgttgggtgccgatcgccctggaattgtgaacaccatcacccgtcatgtcagtagttgcggctgtaatattgaagacagtcgcctggcgatgctgggagaagagttcacgtttattatgctgctttccggttcatggaatgccattactctgattgaatcaacgttaccgttgaaaggtgccgaactggatcttttaatcgtgatgaagcgcacgacggcgcgtccgcgtccgccaatgccagcatctgtctgggttcaggtcgatgtggcagactccccgcatttaattgaacgcttcacagcacttttcgacgcgcatcatatgaacattgcggagctggtgtcgcgcacgcaacctgctgaaaatgaacgggctgcgcagttgcatattcagataaccgcccacagccccgcatctgcggacgcagcaaatattgagcaagcgttcaaagccctatgtacagaactcaatgcacaaggcagtattaacgtcgtcaattattcccaacatgatgaacaggatggagttaagtaatgaatccactgaaagccggtgatatcgcaccgaaatttagcttgccggatcaagacggagaacaagttaatttgaccgacttccagggacagcgtgttctggtttatttctacccgaaagccatgacccccggctgtaccgtacaggcctgcggcttacgcgataacatggatgagttgaaaaaagcgggcgttgatgtgctgggtatcagcaccgataaacccgaaaaactctcccgttttgcggaaaaagagctgcttaactttacgctcctgtctgatgaggaccaccaggtgtgcgaacaattcggcgtctggggtgaaaagtccttcatgggcaaaacctacgatggcattcatcgcatcagcttcctgattgacgctgatggcaaaatcgaacatgtctttgacgatttcaaaaccagcaatcaccacgacgttgtgctgaactggctgaaagaacacgcctgattactttgctccattccgtgctggctgcgcttgcggccagcatacctcacttctcgtgatcaagatcacattctcgctttcccctgcgacacgggtgtcgaatccattttttgctgaacgttaatgaccatcatttttgtaccgttcagaatccagttaatacataacttattgaatatattgagttaatcagaatggcatcctttatgcaatatgaaatgcaatgtttcatatcattttcaaggagccgacatgaaccgctttgtggtggccgaaccactgtggtgtacaggatgtaatacctgtctcgctgcctgttcggacgtgcataaaacgcaaggtttacagcaacacccgcgcctggccctggcgaagacgtcaacaatcactgcccctgtcgtgtgtcatcactgtgaggaagccccttgcctgcaggtctgcccggtcaatgccatctctcagagggatgatgcgatccaactcaacgaaagcctctgtattggctgcaagctttgcgccgtggtctgcccatttggcgcaatcagcgcttcaggaagccgtccggtgaatgcccatgcgcaatatgtttttcaggctgaaggctcactcaaagacggcgaagaaaacgcgccaacacaacatgctttgctgcgctgggaacctggtgtccagaccgtcgcggtgaaatgcgacctgtgtgatttcttgccagaaggtccggcctgcgttcgcgcttgcccgaatcaggcgttacggctgatcaccggtgatagcctgcaacgtcagatgaaagaaaaacagcgccttgccgcaagctggtttgccaatggcggggaggatcccctttccctcactcaggagcaacgctaatggatgccctgcaattattaacctggtcgctgattctctatctgtttgctagtctggcttcgctgtttttactcggtctggacagactggctattaagctttccggcatcacatcgctggtgggcggcgtgattggcatcatcagcggaattacgcaattacatgctggtgtaactttagtcgcccgttttgcccccccttttgaatttgccgatttaaccctgcgaatggatagcctctcggcatttatggtgctggttatctccttgctggtggtggtttgttctctctattcattgacttatatgcgcgaatacgagggcaaaggcgcggcggcgatgggcttctttatgaatattttcatcgcatcgatggttgccctgctggtgatggacaacgctttttggttcatcgtgctgtttgaaatgatgtcgctgtcttcctggtttctggtcattgccaggcaggataaaacgtcgatcaacgctggcatgctctacttttttatcgcccacgccggatcggtgctgataatgatcgccttcttgctgatggggcgcgaaagcggcagcctcgattttgccagtttccgcacgctttcactttctccggggctggcgtcggcggtgttcctgctggcctttttcggttttggcgcgaaagccgggatgatgccgttgcacagctggttgccgcgcgctcaccctgccgcaccatcgcacgcttcggcgttgatgtctggcgtaatggtcaaaataggtattttcggcatcctgaaagtagcgatggatctgctggcgcaaacgggtttgcctctgtggtggggcattctggtgatggcgatcggcgcaatctccgcgctcctgggcgtgctatatgcgctggcggaacaggatatcaaacggctgctggcctggagtaccgtcgaaaacgtcggcattattttgctggcagtcggtgtggcgatggtcggtctgtcactgcacgacccgctgctcaccgtggttggactgctcggcgcactgtttcatctgctcaaccatgcgctgttcaaagggctgctatttctcggcgcgggagcgattatttcgcgtttgcatacccacgacatggaaaaaatgggggcactagcgaaacggatgccgtggacagccgcagcatgcctgattggttgcctcgcgatatcagccattcctccgctgaatggttttatcagcgaatggtacacctggcagtcgctgttctcactaagtcgtgtggaagccgtagcgctacaacttgcgggtcctattgctatggtaatgctggcagtcactggtgggctggcagtaatgtgcttcgtaaaaatgtacggtattactttctgtggtgcgccgcgcagtacacacgctgaagaggcacaggaagtgccaaatacgatgatcgtcgccatgctactgctcgcggcactctgcgtattaattgcgcttagtgccagttggctggcaccgaagataatgcatattgcccatgcgtttaccaatacccctcccgccactgtcgccagcggaatagcacttgtacccggcacgtttcatacacaggtcaccccctcattactgttgctgttactactggcgatgcctttgctgcctggcctttactggctgtggtgtcgttcgcgccgcgcagcgtttcgtcgcacaggagatgcctgggcatgcggctacggctgggaaaatgcgatggccccgtcaggcaatggcgtgatgcagccgctgcgtgtggtcttttctgcgctatttcgtctacgacaacagctcgaccctacgctgaggctaaataaaggtcttgcgcacgtcaccgccagggctcagagcacagaacccttctgggatgagcgggtgatccgccccatcgtgagcgccacccaacggctggccaaagaaatacagcatctgcaaagcggcgactttcgtctctattgcctgtatgtggtcgccgcactggttgtgctgctaatcgctattgccgtctaaggaaatcaccatgagacaaactctttgcgacggatatctggtcatttttgcgttagcacaggccgtgattctgctgatgctaaccccactttttacgggtatttcccggcagatacgcgcgcgtatgcactcccgccgcgggccggggatctggcaggattatcgcgatatccacaaactgtttaaacgccaggaagttgcgccgacatcttcaggtctgatgttccgcctgatgccgtgggtattaatcagcagcatgctggtgctggcgatggccttaccactgtttattaccgtttccccttttgcgggcggcggcgatctgatcacccttatctatcttcttgccctgtttcgttttttctttgctctttccgggctggataccggaagtccgtttgcgggagtcggtgccagtcgcgagttgacgctcggcattctggtcgaaccaatgcttattctctcactgctggtattggcgctgatagcaggttccacgcatatcgagatgatcagcaatacgctggcgatgggctggaactcgccgctaaccaccgtactggcgttactggcctgtggttttgcctgcttcattgagatgggaaaaattccctttgatgttgctgaagcagaacaggaattacaggaaggcccgctgaccgaatattccggtgccgggctggcgctagcgaaatgggggctggggctgaaacaggtcgtgatggcatcactgtttgtggccctgtttctgccctttgggcgcgcgcaagaactttctctcgcctgcctgctgacttcacttgtcgttacgctgctcaaggttttgctgatttttgtactggcctcaatcgcagaaaacacgctggcacgcgggcgttttttactcattcaccatgtgacctggcttggcttcagccttgctgcgcttgcatgggtcttctggttaaccggtctgtaaggagcactgacggaatatggaaaatcttgctctgacgacgttattgctgccttttatcggcgcactggtcgtttcgttttcgccacaacgtcgggccgccgaatggggggttttgttcgccgcgctgaccacgctgtgcatgttgtcactgatctccgcgttttatcaggccgataaagttgccgtcacgttgacgttggtcaacgtgggggatgtggcgttgtttggcctggtcattgatcgcgtgagtacgctgattctgtttgtggtggtgtttctcggtttgctggtcacgatctactccacgggttatctgacggataaaaatcgcgaacacccgcataacggcacgaatcgttattacgcatttttactggtgtttatcggcgcgatggcgggactggtactctcctcgacgctgctcggtcagttgttgttttttgaaattacaggcggctgctcctgggcgttgatcagttattaccagagcgataaagcgcagcgttcagcactaaaagcgttacttatcactcatatcggctcgttggggttgtatcttgccgccgccacgctgtttttgcagaccggaacgtttgcgcttagcgcgatgagcgagttacacggcgacgcacgttatctggtttatggcggcatcctgtttgccgcgtgggggaaatcggcccagctaccgatgcaagcgtggctaccggacgcaatggaagcgccaacaccgatcagcgcctatctccacgccgcatcgatggtgaaagtgggcgtttacatttttgcccgcgctattatcgacggcggcaatatcccgcatgtgattggcggcgttggcatggtcatggcactggtcaccattctttatggctttctgatgtatttgccacagcaggatatgaagcggttgctagcctggtcgaccatcactcaacttggctggatgttcttcggcttgtcgctctccatcttcggctcgcggctggcgctggagggcagcatcgcctacatcgtcaaccacgcgttcgctaaaagcctgtttttccttgtagcaggtgcgctgagttacagctgcggcacgcgcttgttgccgcgtctgcgtggcgtattgcacaccctgccgttgccaggcgtgggtttctgcgtggcagcgctggcgattaccggcgtgccgccgttcaacggcttcttcagtaaattcccgctgtttgctgccggttttgcgttgtcagtggagtactggatcctgctgcccgccatgattcttctgatgattgaatcggtcgccagtttcgcctggtttattcgctggtttggtcgcgttgtgcctggcaaaccgagcgaggccgtcgccgatgccgcaccgctgccaggatcaatgcgcctggtgttgattgtactgattgtgatgtcgctgatttccagcgtaatcgccgcgacctggttgcagtaaggagatgatgaatgaccggttctatgatcgtaaataatctggcgggactgatgatgctgacatcgctgtttgtgattagcgtcaaaagctatcgcctgtcatgcggattttacgcctgccagtcactggtgctggtgtctattttcgccactctctcgtgcctgttcgccgcagagcaactgctgatctggtccgccagcgcctttatcaccaaagtgctgctggtaccgttaatcatgacttacgctgcacgaaatattccccagaacatcccggaaaaagcgttattcggtccggcaatgatggcactgctcgcggcgttaattgtcctgctttgcgcatttgtcgttcagcccgtgaagctaccgatggctaccgggctgaaaccggcgctggcggtagcgttaggtcattttctgcttggcctgctgtgcattgtcagccagcgcaatatcctgcggcaaatttttggttactgcctgatggaaaacggctcccatctggtgctggcgcttcttgcctggcgagcaccggaactggtggaaataggtatcgctaccgacgccatcttcgccgtcattgtgatggtgttactggcaagaaaaatatggcgtacccacggcacgctggacgtgaacaacttgaccgcgctgaagggataatgagatgagttattctgtgatgttcgctttactcctgctcacgccgctgcttttttcgctgctctgttttgcctgccggaaacggagactttctgcgactcgcacggtgaccgtattacatagcttagggatcacactgctgctgattctggcactctgggtggtccaaactgccgctgatgcaggagaaatattcgctgcgggactgtggcttcatattgatggtctgggcggtttgttcctcgccattcttggtgtgattggctttctcaccggtatttactcgattggctacatgcgtcatgaagtggcacacggcgagctttcacccgttacgctgtgcgattactacggtttcttccatctgtttttgttcaccatgctgctggttgttaccagcaataacctgattgtgatgtgggcggcgatcgaagccaccaccttaagctcggcgtttctggtaggcatttacggtcagcgttcatcgctggaagctgcatggaagtacatcattatttgtactgttggtgtcgcttttggtctgttcggtaccgtgctggtatacgccaacgccgccagcgttatgccgcaggcagaaatggcgatattctggagcgaggttcttaagcaatcgtccttgcttgacccaacattaatgctgttggcctttgtgtttttgctaattggctttggtaccaaaaccgggctatttcccatgcacgcctggctgccggatgctcacagtgaagcgccgagtccggtcagcgccctgctctccgccgtattgctgaactgcgcgctgttggtgctgattcgctattacatcattatttgccaagccatcggcagcgatttccccaaccggttgttgctcatcttcggcatgttgtcggttgccgtggcggcatttttcattctggtacagcgggacattaagcgtctgctggcgtactccagcgtggagaacatggggctggtcgcggtggagctaggcattggcgggccgctgggaatttttgccgcgctgctgcacatcttaaaccacagtctggcaaaaacgctgctgttctgcggttccggcaatgtactgctcaagtacggcacgcgcgatctcaacgtcgtctgtgggatgctcaaaatcatgccatttaccgccgtgctgtttggcggcggtgcgctggcgctggcagggatgccgcccttcaacatttttcttagcgaatttatgaccattaccgccggactggcacgtaatcacctgctgattatcgtcctgctgttattgctgttaacgctggtgctggcgggcctggtacggatggctgcgcgggtgttaatggcgaaaccgccgcaggccgttaaccggggtgatctcggctggttgaccacctcgccaatggtgattctgctggtcatgatgctggcgatgggaacgcatattccacaacctgtcatcaggatcctggcgggcgcttccactatagtcctctcagggacgcacgatctgcctgcacaacgtagcacctggcatgattttttgccttcaggcaccgcatctgtttcggagaaacacagtgaacgttaattcatcgtcaaatcgtggcgaagcgattctcgccgccctgaaaacgcagttccccggcgcggtgctggatgaagagcgacaaacgcctgaacaggtcaccattacggtgaaaatcaatctgctgcctgacgttgtacagtatctttattatcaacatgatggctggcttccggtcctgtttggcaacgacgagcggacacttaacggtcattacgcggtttattatgccctttcaatggaaggggccgaaaaatgctggattgtggtgaaggcgctggtcgatgccgacagtcgggagtttccgtcagtcacaccgcgcgtccctgccgcggtctggggcgagcgagaaattcgcgatatgtacgggctgattccggttggcctgccggatcagcgtcgcctggtgttgcccgatgactggccggaagatatgcatccgctgcgcaaagatgcgatggattatcgactgcgccctgaaccgacgactgattccgaaacgtatccgtttatcaatgagggcaacagcgatgcgcgggtgatccctgtcggcccgctgcatatcacctccgatgaaccgggtcacttccgcttgtttgtggatggcgagcaaattgtcgatgctgattaccgcctgttttatgtccatcgcggcatggagaaactggcagaaacgcggatgggctacaacgaagtgaccttcttatcggaccgcgtgtgtgggatttgcggttttgcccacagtgtggcctataccaattcggttgaaaatgcactggggattgaggtgccgcaacgagcacatactattcgctcgattctgctggaagtcgaacggctacacagtcatttgcttaaccttggcctctcctgccatttcgttggttttgataccggctttatgcaatttttccgcgtgcgggaaaagtcgatgacgatggcggaattgctgatcgggtcgcgtaaaacctacggtctgaatctgattggtggtgttcgccgcgatattctcaaagagcaacgtctgcaaacgctgaaactggtgcgcgagatgcgcgccgacgtgtcggagctggtagagatgctgcttgctacgccgaatatggaacaacgcactcagggcattggcattctcgaccgacaaatcgcccgtgatttgcgctttgatcacccctacgccgactacggcaatattccaaaaacactgtttacctttaccggcggcgatgttttctcccgcgtgatggtccgtgtcaaagagacgtttgattcgctggcaatgctggaatttgccctcgacaacatgccggataccccactgctgaccgaaggctttagctataaacctcacgcattcgcgctgggctttgttgaagcgccacgcggtgaagacgtgcactggagcatgctcggtgataaccaaaaattgttccgctggcgctgccgtgccgccacctacgccaactggccggtgttgcgttacatgctgcgcggcaataccgtttctgacgcaccgctgattatcggtagccttgatccctgctactcctgtaccgaccgtgtgacgctggtagatgtgcgcaagcgccagtcaaaaaccgtgccgtataaagagatcgaacgctacggcattgatcgtaaccgttcgccgctgaagtaaggacagaagatgctgaagttactgaaaactattatgcgcgccggaaccgcgacggtgaaatatcccttcgcgccactggaggtcagccctggctttcgcggaaaaccggacctgatgcccagccaatgtattgcctgcggtgcctgcgcctgtgcttgtccggcaaatgcgctgactatccagaccgacgaccagcaaaattcgcgcacctggcagctctatctggggcgttgtatttactgcggacgttgtgaagaagtgtgcccgaccagagccatccagcttaccaataactttgaactgaccgtcaccaataaagccgatctctatacccgcgcgacgttccatctacaacgttgcagccgttgcgaacgcccgtttgccccgcaaaaaaccatcgcactggctgctgaattgttagcacagcaacaaaatgcgccacaaaaccgcgaaatgttgtgggcgcaagcgagcgtctgcccggaatgcaaacaacgcgcgacgctgatcaacgacgatacagatgtactgctggtggctaaggagcagctatgagtccagtgcttacacaacatgtcagccagcccatcacgctggacgagcaaacgcaaaagatgaagcggcatttgctacaggatatccgtcgctcggcttacgtttatcgcgtcgattgcggcggctgcaacgcctgtgaaatcgaaatttttgctgccattacaccagtattcgacgcagaacgttttggcattaaggttgtttcatcaccgcgtcacgccgatattttgttatttactggcgcagtcacccgggcgatgcgtatgcctgcacttcgggcgtatgagtctgcccccgatcataaaatttgtgtttcctacggcgcgtgcggtgtcggcggcggtattttccacgatctctacagcgtctggggcggtagcgacaccattgtccccattgatgtttggatccccggctgcccgccaacaccggccgccaccattcacggtttcgccgtggcgctcggtttgctgcaacagaagattcacgctgtggattatcgcgatcccaccggggtgactatgcaaccgttgtggccgcagatcccgccatcacagcgtatcgccattgagcgagaagcgcggcggctggcgggctatcgtcaggggcgagaaatttgcgatcggctcctgcgccatttaagcgacgatcctacaggaaatcgggttaacacctggttgcgcgatgccgacgatccacgtctcaatagtatcgttcagcaactctttcgcgtactccgggggttacatgactgaagagtgcggggaaattgttttctggacgctgcgaaaaaagtttgtcgccagtagcgacgagatgccggaacacagctctcaggtaatgtattactcgctagctatcggccatcacgttggcgtgattgattgtctgaatgtcgccttccgctgcccactgacggaatacgaagattggcttgcactggtcgaagaggagcaagcccgacgtaagatgctgggggtgatgacttttggtgagattgttattgacgccagccacaccgccctgttgacccgggcattcgcgccactggcggatgacgcgacgtctgtgtggcaggcgcgtagcattcaattcattcatctgttggatgaaattgtgcaggaaccggccatctatctgatggccagaaaaattgcgtgagaaggatttctcattaataaggactgttgatggctatgtcagacgaggcgatgtttgccccgccacaaggaataacaattgaagcggtaaacggaatgctcgcggagcggttagcacagaaacacggcaaggcgtctttattacgcgccttcatcccgctgccgccgccgttcagcccggtacaacttattgaactgcatgttctcaaaagcaacttctattaccgctaccatgatgatggcagcgatgtgacggcaacaacagagtatcagggcgagatggtcgattattcgcgtcacgccgtccttctcggcagtagtggaatggcggagctacgctttattcgcacccacggcagtcgttttacttcccaggattgcacactgtttaactggctggcgcggataatcaccccggttctgcaatcatggctcaatgatgaagaacagcaggtggcgctgcgtttgctggagaaagatcgcgatcatcatcgggtactggttgatattactaatgcagtgctgtcacatcttgatctcgacgatctgatcgctgacgtcgctcgtgagatccatcattttttcggtctggcttcagtcagtatggtactgggcgatcatcgaaagaacgagaagttcagcctgtggtgcagcgatctttctgcctcacattgtgcgtgtctgccacgctgtatgcctggcgaaagtgtattgctgacacaaacgctacaaacccgacaaccgaccttgacgcaccgtgcagatgatctgtttctctggcaacgcgacccgttattactcttacttgcatctaacggctgcgaatctgcgctccttataccgcttacctttggcaaccatacaccgggtgcattgttgctggcgcatacctcttccactctctttagtgaggaaaactgccagctactacaacacatagccgatcgcatcgctattgccgttggcaatgccgatgcctggcgtagcatgaccgatttgcaggaaagtttgcagcaagaaaaccaccagcttagcgagcagctcctttcgaatctgggcatcggtgacattatctatcaaagccaggcaatggaagacctgctccagcaggtagatattgtggcgaagagcgacagtacggtgttgatttgtggtgaaaccggaactggcaaagaggtgatcgccagagcgatccatcaacttagcccgcgacgcgacaagccgctggtcaaaatcaactgcgctgccatccccgccagtcttctggaaagtgagttattcggtcatgacaaaggggcgtttactggtgcgattaatacccatcgtggtcgttttgaaattgccgatggcggcacgttgtttctcgatgaaattggcgatctgccgttagaacttcagcctaaactgctgcgcgtattgcaggagcgggagattgagcgtctcggcgggagtagaacgatcccggtgaatgtcagagtcattgccgccaccaaccgtgatttgtggcaaatggttgaagatcgccagtttcgcagcgatctcttttatcgcctgaatgtcttcccactggaattgccgccgctacgcgaccgtccggaagatatccctcttttagcaaaacatttcacgcaaaaaatggcgcgccatatgaatcgcgcaattgacgccatcccgaccgaggcactacgccagttgatgtcgtgggattggccgggcaacgtgcgcgagctggaaaacgtgattgagcgggcggtactgttgactcgtggtaacagtctgaatttacatctaaatgtccgacaaagccgtttactgccgacgctaaatgaagattcagcgcttcgcagttcaatggcgcagttactgcacccgacgacgccagagaatgacgaagaagaacgtcagcgcattgttcaggtattgcgagaaaccaatggcattgttgccgggccccgtggcgcagcgacgcgattagggatgaagcgcaccacgctgctgtcacgaatgcagcggctggggatctcggttcgcgaggtgttgtaatctgcttttgcaggagtatgcatgagaaacaaactctctttcgacttgcagttgagcgccagaaaagcggcaatcgctgaacggattgccgcccataaaattgcccgcagtaaagtgtcggtctttttaatggcgatgtccgctggcgtgtttatggcgatcggatttactttttacctttccgttatcgccgatgccccgtcttcacaggcattaacccatctggtgggcggcctttgctttacactcggctttattttgctggcggtttgcggcaccagcctgttcacctcgtcggtaatgacggtgatggcaaaaagtcggggcgttattagttggcgaacttggctgattaacgcacttctggtggcctgcggtaatctggcaggtattgcctgtttcagtttgttaatctggttttccgggctggtgatgagtgaaaacgcgatgtggggagtcgcggttttacactgcgccgagggcaaaatgcatcatacatttactgaatctgtcagcctcggcattatgtgcaatctgatggtttgcctggcgctgtggatgagttattgcgggcgttcgttatgcgacaaaatcgtcgccatgattttgcccatcaccctgtttgtcgccagtggctttgagcactgtatcgccaatttgtttgtgattccgttcgccattgccattcgccatttcgcccctccccccttctggcagctggcgcacagtagcgcagacaattttccggcactgacggtcagccattttattaccgccaatctgctcccggtgatgctgggtaatattatcggcggtgcggtgctggtgagtatgtgttatcgggctatttatttacgtcaggaaccctgaaaaatcagcccggcgaaacagttcgtcgggctgaagattattcttgcgcgatttgcccatcgggccaggcatgaatcacggctttgatcagcgtcgccaacggaatggcgaagaatacgccccagaatccccacaaaccaccgaagatcaccaccgataaaataatcaccagcggatgcaggttaaccgcttcggagaacaacaccggcactaacaggttgccgtccagcgcctgaataatcagatacaccgcgaagcagctccagaattcagtacctgcgccaaactggaatagcgccacgccaaccaccggaatggtcaccacaaatgcgccaatgtacggaataagaaccgagaagccgaccagcactgccagcagcagcgaatagttcagcccgaagagcaagaaccccagccaggtggcgatccccaccacgatcatctccagcactttgccgcggatatagttggtgatttgttgattcatctccttccacacctgtcctgccagcccacggttacgcggcagcacccggcgaacggcgttcagcatctgctctttgtctttcagcaggaagaagaccatcaatggcaccagcaccagatagacggctatggtcagcaaaccgaccagcgaggcgagggaaattttcaccaccgaatcgcccatggtcagcatccgactgcgcatattttcggccattgcatcaataatgcccgcgtccattaacgccggatagcggcgcggcaacgtggcggcaaagtcagaaagcttattgagcatccccggcatatcgcggattaagtagatgccctgttgccaggcgataggcagtaccacgaacgccatcagtagcaatataccgacgaaaaccaccaatacaatcgacgtcgcccagcggcgggagcagccaatagattgcagacgcacggttggccattccagcaaataggccagcacaatagccaccagcaacggagcaagcaggccactaaagaaaaagataatgccaaatccggcaactaaaataaccagcaaggcaatcgcttccgggtcgctaaaacggcggcgataccattgcatcaacatttcgagcataaagaccttccctgaacctcaagagcgggattgcgatccgcaattgtatcgaaatgtcacaaaaaagacttcgctttttatgacggattcaggaaactgaaaagtcatttgagtgggctaatcttcgccgttacactcaaaggcggcgcggtgggaacgatatttcacagtatcggtcaaatgactatctccagaaatacaggatagaggttatgttcaggcagttgaaaaaaaacctggttgcaaccctcattgctgctatgaccattggtcaggtagccccggcgtttgccgacagcgcagacaccttgccggatatgggaacctccgcaggaagcacgctttccattggtcaggaaatgcagatgggcgactattatgtccgccagctacgcggcagcgcgccgttaattaatgacccgctgttaacgcaatatattaattcgctggggatgcgtctggtttcgcatgccaattcggttaagacaccgtttcatttttttctgatcaacaacgacgaaattaacgcctttgctttctttggcggcaacgtggtgctgcactctgccctgttccgttattccgataacgaaagtcaactggcttcagttatggcgcacgaaatctcccacgtcacccaacgtcacctggcgcgagcgatggaagatcagcagcgcagcgcgccgctgacctgggtcggcgcgttaggttctattttactggcgatggccagtccgcaggcggggatggcggcgctgaccggtacactggcgggaacgcgtcaggggatgatcagtttcacccagcaaaatgaacaggaagcggaccgcattggtattcaggtgctgcaacgctcgggattcgatccgcaggcgatgccaaccttcctcgaaaaattactcgatcaggcgcgttactcctcgcgcccgccggaaattttattgactcacccgttgccggaaagtcgtctggcagatgcccgcaaccgtgctaatcagatgcgcccgatggtggtgcagtcgtcggaagatttctatctggcgaaagcgcgcacactggggatgtataattccggacgtaaccagctcaccagtgatttgctggatgaatgggcgaaaggaaacgttcgtcagcaacgagcagcacaatatggtcgtgctttacaggcgatggaagccaataaatacgacgaggcgcgtaaaacgctgcaaccgttactggcggcagaacctggcaacgcatggtatctcgatctggctactgatatcgatcttgggcaaaacaaagccaatgaggcgatcaatcgtctgaaaaatgcccgcgatttacgcaccaatccggtgttgcagctcaacctggcgaacgcttatttgcaaggcggtcaaccacaagaagcggccaatattctgaatcgctacacctttaataataaagatgacagcaacggctgggatttgctggcacaggcggaagccgcgctaaataaccgcgatcaggagctggctgcgcgagcagaaggttatgcgctcgccggacgactcgatcaggccatttcgctgttgagtagcgccagttcgcaggtgaaattaggcagcctgcaacaagcgcgttacgatgcgcgcatcgaccagttgcgccagctgcaggaacgctttaagccttataccaagatgtaattcgcattaaaggaagaacaatgaccaaacaggtaaaaatctaccataacccacgctgttcaaagagccgggaaacgctgaacctgctgaaagaaaacggcgtggagccagaagtggtgctctaccttgagacacccgccgatgcggcaacgctgcgcgatttgctgaaaatactggggatgaatagcgcccgtgaattgatgcgccagaaagaggatctttataaagaactgaacctggctgacagttcgcttagcgaagaggcgctgattcaggcaatggtggataatccgaagctgatggagcgcccgattgtggtcgcgaatggcaaagcgcggattggtcgtccaccggagcaggtactggaaatcgtgggttaagatgtgctccatcgctagttgaagcacattgccggatgcgacgcttgccacgtcttatccggcctacgaatactatggattaacttcgcgtagttcggataaggcgttcgcgccgcatccgacaataaacaccttatctacaacttcagaatttctttcacaaacggaatggtcagcttacgttgcgcggtaatcgacgcacgatccaactgatccaacgtcataaatagcgtgcgcatttctctgtcgagccgcttcagcaagaaacgccccacatcttccggcagttcaaaaccacgcaaacgcgcgcgtaactgtagcgcctgcaacttatcttcatcagaaagtggctgcaatttgtagatctgcccccagtcgagtcgcgacgcgagatccggtaatcccagattcaactgccgcggtggacgatcgccggtgatcaacaaccgtgttttgcccgattccagaattcgattgtagagatcgaaaatcgccatctcccacaactcatcgcctgcaatacactcaatgttgtcgatacagaccagcgacaaatgctccataccgtcgagcacttccggaacaaaccaggtgcgtttatccagcgggacatagcccaccgcatcgccacgctgcgacaattccgcgcaagccgcgtgcagcagatggctgcgccccgcgccttcgcgtgcccagagatagatgtaaccgctatgttcctgacgcagcacgttttgcagcgcggccagtaaagaggagttatcccccggccagaaacttgcaaaggtttcgtcgtcaggaagataaagtggcaaagagagctgtgccggtgtgttcagagatacctcaaccaggatttcacaaaatcgcgagaagtttaccacagaatcccatgatgtttgaaccgggcagcaacactgcccggtcggtacattatttgtctgttatatccgcgtcttctgcgtccagcaccacttcttcagggcgcagcacactgatcagtttgaagatcaaacttaagccgataccgacgatggtcgccagcgccataccttttaactccgccgcgccgatgtttaccttcgcgccactgacgccgatgatcaaaatcacggaagtcaggatcaggttctgtgctttgttgtaatccactttcgattcgatcaaaacacgaataccggaagcaccgatgacaccataaagcagcagcgaaacgccgcccatcaccggcaatgggatcatctggatagcggcagccagtttaccgacgcaggaaagcaggatagcgaaaatcgccgccccgccgataacccaggtactgtaaacacgggtgatcgccatcacgccaatgttttctccgtaagtagtatttggcgtagagccaaagaagccggaaatcacggtcgacaagccattagcaaacatcgaacggtgcagacctggatcgcgcagcagatcttttttgacgatattagccgttactaccaggtgccctacgtgttcggcaataaccactaacgccgctggcagaatagtcagaatggcaaaccactcgaagcgcggcgtatagagggttggcagcgcaaaccagtgagcattaataatcggcgtggtatcgacaattcccattgcgaaagagagcgcgtaccccaccagcacgccaattaaaatcgggataattgccaggaaaccacgaaacagcacggaacctaaaaccgtgaccgccagggtggtaatagagatgatgatggttttggagtctggcgtttgcccttcagccgggagtaaacccgccataccggcagctacgcccgccagctccagaccgatgacggcaacgattgcgcccattgccgcaggtggaaacagcacgtccagccagccggtccccgctttcttcacgataaaagaaaccaggcagaacagcacgccgcacataataaagccgcccagcgcgacttcataccctaacggcaacagtaacaataccggtgaaataaaggcaaagctggaaccaagataagccggaattttccctttacagatgaagagatacagcagcgttccaataccgttaaataacagtacagtcgccgggttaatatgaaataagacgggcaccaggacggttgcaccaaacatggcgaacaaatgttgcaaactaagcgggattgtctgtaaaagtggcggtctttcactcaccccgatagcacggcgcgtcatagtattatcctctgtattatgtgttataggcgctttactcaaaaaaaagccgactcttaaagtcggctttaattatttttattctttatttcgtaccaaagattttgtcaccggcatcgccgaggcccggaataatgtatccgtgctcgttcagtccctgatcaatcgatgcggtatacagttcgacgtccgggtgcgctttttccagcgcagcgataccttctggcgcagctaccagcaccagaactttgatgctgctgcagcccgcttttttcagcaggtcgatggtcgcgataacggaaccaccggttgccagcattgggtcaacgatcagcgccatacgctcatcgatgttagaaaccagtttctggaagtacggtaccggctccagcgtttcttcattacggtacataccgacaacgctgatgcgcgcgctcggaacgttttccagcacaccgtccatcataccaagacccgcacgcagaattggcacaacggtaattttcttacctttgatctggtcgatttctaccgggccgttccagccttcgatagttactttttccgtttcgaggtcggcggtcgcttcgtaagtcagcaggctacccacttcggaagcgagttcgcgaaagcgcttggtgctgatatcttgctcacgcatcagtcccagcttgtgtttgacgagtgggtgtttgacttccacgatcttcatactctttctcctttgaggggcagccacaaaaaaaatcgacggattatacctcctttcttcaaggcggcaatattcttttcgttgactttagtcaaaatgataacggtttgagataaagttattttatattcagatggttatgaaagaagattattccatccgaaaactaacctttaccctggcacaagtcttctttcgccgcgcgcctggggaaaagacgtgcaaaaaggttgtgtaaagcagtctcgcaaacgtttgctttccctgttagaattgcgccgaattttatttttctaccgcaagtaacgcgtggggacccaagcagtgaccgataaaacctctcttagctacaaagatgccggtgttgatattgacgcgggtaatgctctggttggaagaatcaaaggcgtagtgaagaaaacgcgtcgtccggaagtgatgggcggtctgggcggcttcggtgcgctgtgtgcattgccgcaaaaatatcgtgaacccgtgctggtttctggcactgacggcgtaggtaccaagctgcgtctggcaatggacttaaaacgtcacgacaccattggtattgatctggtcgccatgtgcgttaatgacctggtggtgcaaggtgcagagccgctgtttttcctcgactattacgcaaccggaaaactggatgttgataccgcttcagcggtgatcagcggcattgcggaaggttgtctgcaatcaggctgttcactggtgggtggcgaaacggcagaaatgccggggatgtatcacggtgaggattacgatgtcgcgggtttctgcgttggcgtggtagaaaaatcagaaatcatcgacggctctaaagtcagcgacggcgatgtgctgattgcactcggttccagcggtccacactcgaacggctattcgctggtgcgcaaaattcttgaagtcagcggttgtgatccgcaaaccaccgaacttgatggtaagccattagccgatcatctgctggcaccgacccgcatttacgtgaagtcagtgctggagttgattgaaaaggtcgatgtgcatgccattgcgcacctgaccggcggcggcttctgggaaaacattccgcgcgtattgccagataatactcaggcagtgattgatgaatcttcctggcagtggccggaagtgttcaactggctgcaaacggcaggtaacgttgagcaccatgaaatgtatcgcaccttcaactgcggcgtcgggatgattattgccctgcctgctccggaagtggacaaagccctcgccctgctcaatgccaacggtgaaaacgcgtggaaaatcggtatcatcaaagcctctgattccgaacaacgcgtggttatcgaataatgaatattgtggtgcttatttccggcaacggaagtaatttacaggcaattattgacgcctgtaaaaccaacaaaattaaaggcaccgtacgggcagttttcagcaataaggccgacgcgttcggccttgaacgcgcccgccaggcgggtattgcaacgcatacgctcatcgccagcgcgtttgacagtcgtgaagcctatgaccgggagttgattcatgaaatcgacatgtacgcacccgatgtggtcgtgctggctggttttatgcgcattctcagcccggcgtttgtctcccactatgccgggcgtttgctgaacattcacccttctctgctgccgaaatatcccggattacacacccatcgtcaggcgctggaaaatggcgatgaagagcacggtacatcggtgcatttcgtcaccgatgaactggacggtggcccggttattttacaggcgaaagtcccggtatttgctggtgattcggaagatgacatcaccgcccgcgtgcaaacccaggaacacgccatttatccactggtgattagctggtttgccgatggtcgtctgaaaatgcacgaaaacgccgcgtggctggatggtcaacgtctgccgccgcagggctacgctgccgacgagtaatacccccgtaattaaagcgccagctctgccgctggcgtttttcaattcacctgtaaatcgcaagctccagcagtttttttcccccttttctggcatagttggacatctgccaatattgctcgccataatatccaggcagtgtcccgtgaataaaacggagtaaaagtggtaatgggtcaggaaaagctatacatcgaaaaagagctcagttggttatcgttcaatgaacgcgtgcttcaggaagcggcggacaaatctaacccgctgattgaaaggatgcgtttcctggggatctattccaataaccttgatgagttctataaagtccgcttcgctgaactgaagcgacgcatcattattagcgaagaacaaggctccaactctcattcccgccatttactgggcaaaattcagtcccgggtgctgaaagccgatcaggaattcgacggcctctacaacgagctattgctggagatggcgcgcaaccagatcttcctgattaatgaacgccagctctccgtcaatcaacaaaactggctgcgtcattattttaagcagtatctgcgtcagcacattacgccgattttaatcaatcctgacactgacttagtgcagttcctgaaagatgattacacctatctggcggtggaaattatccgtggcgataccatccgttacgcgctgctggagatcccatcagataaagtgccgcgctttgtgaatttaccgccagaagcgccgcgtcgacgcaagccgatgattcttctggataacattctgcgttactgccttgatgatattttcaaaggcttctttgattatgacgcgctgaatgcctattcaatgaagatgacccgcgatgccgaatacgatttagtgcatgagatggaagccagcctgatggagttgatgtcttccagtctcaagcagcgtttaactgctgagccggtgcgttttgtttatcagcgcgatatgcccaatgcgctggttgaagtgttacgcgaaaaactgactatttcccgctacgactccatcgtccccggcggtcgttatcataattttaaagactttattaatttccccaatgtcggcaaagccaatctggtgaacaaaccactgccgcgtttacgccatatttggtttgataaagcccagttccgcaatggttttgatgccattcgcgaacgcgatgtgttgctctattatccttatcacacctttgagcatgtgctggaactgctgcgtcaggcttcgttcgacccgagcgtactggcgattaaaattaacatttaccgcgtggcgaaagattcacgcatcatcgactcgatgatccacgccgcacataacggtaagaaagtcaccgtggtggttgagttacaggcgcgtttcgacgaagaagccaacattcactgggcgaagcgcctgaccgaagcaggcgtgcacgttatcttctctgcgccggggctgaaaattcacgccaaactgttcctgatttcacgtaaagaaaacggtgaagtggtgcgttatgcacacatcgggaccgggaactttaacgaaaaaaccgcgcgtctttatactgactattcgttgctgaccgccgatgcgcgcatcaccaacgaagtacggcgggtatttaactttattgaaaacccataccgtccggtgacatttgattatttaatggtatcgccgcaaaactcccgccgcctattgtatgaaatggtggaccgcgagatcgccaacgcgcagcaagggctgcccagtggtatcaccctgaagctaaataaccttgtcgataaaggcctggttgatcgtctgtatgcggcctccagctccggcgtaccggttaatctgctggttcgcggaatgtgttcgctgatccccaatctggaaggcattagcgacaacattcgtgccatcagtattgttgaccgttaccttgaacatgaccgggtttatatttttgaaaatggcggcgataaaaaggtctacctttcttccgccgactggatgacgcgcaatattgattatcgtattgaagtggcgacgccgctgctcgatccgcgcctgaagcagcgggtactggacatcatcgacatattgttcagcgatacggtcaaagcacgttatatcgataaagaactcagtaatcgctacgttccccgcggcaatcgccgcaaagtacgggcgcagttggcgatttatgactacatcaaatcactcgaacaacctgaataaccctatgccaatacacgataaatcccctcgtccgcaggagtttgctgcggtcgatcttggttcaaacagttttcacatggtcatagcccgtgtggtagatggtgccatgcagattattggccgcctgaaacagcgggtgcatctggcggacggcctggggccagataatatgttgagtgaagaggcaatgacgcgcggtttaaactgtctgtcgctgtttgccgaacggctacaagggttttctcctgccagcgtctgtatagttggtacccatacgctgcgtcaggcgctgaacgccactgactttctgaaacgcgcggaaaaggtcattccctacccgattgaaattatttccggtaatgaagaagcccgtctgatttttatgggcgtggaacatacccaaccggaaaaaggtcgcaaactggttattgatattggcggcggatctacggaactggtgattggtgaaaatttcgaacctattctcgttgaaagccgccggatgggttgtgtcagctttgcccagctttattttcctggcggggtcatcaataaagagaattttcagcgcgctcgcatggcggcagcacaaaaactggaaactttaacctggcaattccgtattcagggctggaacgttgcaatgggcgcttccggtaccataaaagccgcccatgaagtgttaatggaaatgggcgagaaagacgggataattaccccggaacgtctggaaaaactggtaaaagaagttttacgtcaccgtaatttcgcatcgctgagtttaccgggtctttccgaagagcggaaaacagtcttcgttccgggactggcgattttatgcggtgtgtttgatgctttagccatccgtgaactgcgcctttctgacggggcgttacgcgaaggcgtactgtatgaaatggaaggacgtttccgtcatcaggatgtgcgtagtcgcaccgccagcagcctcgccaaccagtatcacatcgacagcgaacaggcccgacgggtgctggataccactatgcaaatgtacgaacagtggcgggaacagcaaccgaagctggcgcatccgcaactggaggcgctactgcgatgggccgccatgctgcatgaggtcgggttgaatatcaaccacagcggtttgcatcgccactccgcttatattctgcaaaacagtgacttgccgggttttaatcaggaacagcagctgatgatggcgacactggtgcgctatcaccgtaaagcgattaagctcgacgatctaccgcgctttaccttgtttaagaagaaacagttcctgccactgatacagctattgcgccttggcgtattactcaacaatcaacgtcaggcaaccaccacaccgccaacattgacgctgattactgatgacagtcactggacactgcgtttcccgcatgactggtttagtcagaatgcgctggtactgcttgatctggaaaaggagcaagaatactgggaaggcgtggctggctggcggttgaaaattgaagaagaaagtacaccagaaatcgccgcttaatactttgcgggccgacgagaaatgtcggcccgcattattcaggcactttcgcgaatgggttcgatttcattcagcgtatcaattaacggctgcggcttaccaataagataaccctgcatataatcgatccccaaagagagcaccgcctcgcggatctcttcgttttcaacgtactctgccactaccagcattttcttcattcgcgccaggtggcaaatcgatgccactatctgataatccagactatttgacacaatattgcggataaaactgccgtcaattttaagcagatcggcattcacatttttaagccgcgcatagctggcgtagccggtgccgaaatcatcaatcgcaatctggcagcctaattcctgaagatgctgcaaggtgatttgcgcctgcttaacattggtcagagcattactttcggtgacttcaaaaataagttgccacgcttcaatctgatatttagccagcaactgactgacttcaacaggaaaacgagcctgacataccgaggttggagacagattaatagcaaaacggtgagcgggcatcttcgctctgttttcagccataaattgcagcgtatgctcaatgacccacatgtcgatactcgacgataaaccaaattcgtgcgcgaccggcaagaagctatcggggctgatcagttcatcattctcacctttcatgcgcagaagaatttcatggtaaacatcaccacgcataccggtaatcggctgggccatcaggaaaaaatggttgtgttccagcgcctgctgtagtcgattcatcatcgcgactttatctttcaattcgcgttgcaaatacattgccccgcgacgctgcatattttccggggcgttggtcacgatggaaagttcggcgaccgtatttagctctcccagcagcaggtagatatgattcactggcgagcgcacatagcagtaactgacgccaatctgcggttgcatcggcatgccatcccaaaagaaacgaaattgcttgagatggctatccagtgcggtaatgcgctcctggtgcgattctgtattcagtcgcagcgcgagatcgttacccgaaagctgataaacatcttcacccggttccagcaagggtgacagccagtgagaaagtttttgcttgtattgaatccgcagcatgatgccatagttcttaaccagcatttccatgccagggatgcgtaaataacaaagcgcagaccagggggcatcacgcaacgcgcgattcagggcgcgaacatttggcagatgaaccaccgggtccacatacgcaagccgctgaatgcgtctgactaccgctctctgacgggttgccagtacagccatataattgacaataaaagagaataccagataactggaggaggttatggtcagctgcgtggtatagccaggataaatgggaatgtaattttgatagctgtggatgctgatcatcaacacgaccgcccagagcagcgaaatcagcttataaccatagcgcatcgctccccacatcatcaggggcagcaataatgacaaggtataattggtgctaaaaattgtgcttttttcatttaacggcatgcataacagcaacaataaagcacctaatgccagtagccagagcgcgaactcttttttggtgactttggcatcaacctgctgttttaattgcgaataatagctacgtaaataaaatggatttcgcactacccgaatgatgaagtagcacagcgggacaccgatcagattacccaccagtaaggcctgataattgattaaagtcccgaggttaaaaggcatgacaccgaccagattttctctgctcgccagtaatcctacaaatgcagcaaactggaaaagtatcagaaacagcgttgcaggaaacacaatctgccagaatatacgctgggaaattaaacgggtatcaccatgtgaaacgttgttacgccggggagtaaagaccctgtaaccgccccaacagagaatgataatgataataaaattagccgttaatgatagcgtttcgtaaaaacccagctctgcatatttgcggacaaaaatccctaaggcgatccctggcaatgccgcccagctgaaaaacatcatcatgctgatcatcagtgccagaggcagataaaagagaaaaacctcaccggaagaaatatgcgcgaaagtattaatgtgggcgaaaatgggcaagattaaagaaggcaggaacagcggaagcccccaccatttatcacgtatttttatataagttgcattcagtttcatagatgctcagcagaatcccccacatcctgaaggaggtgtattcagacaggcatcccacctgacttcgaatgatgattattcatcactatagagagcattgattctaagtgtcatatgaaagtaccaattgatatatatcaaacaaaataaccctgattaatgaattattacgtttatcatgttaattcatcattattacatcatcattgtaaataattaaattaacttccataacattaaaatatgtatccactgacgcttttttacataacgaagaattgaccattttgtcctgttgtgccttaatgtaagtaccgtccacagcgtgggacatacttcaaggaaccttttgtgagtcaggcaaccagtatgcgaaaacgacaccgatttaacagtcgcatgacccgtatcgtactgctcatcagctttatcttcttctttggccgttttatctactcgtccgtcggtgcctggcagcaccatcagagcaaaaaagaagctcagcaatccacactctccgtcgaatcaccggtacaacgttagcggttaccttctccactttcacagaacataacggcacttcgctgtcggatgcttttgctgtttgggattatcaaagcggcagatattctttcatcttaaattttacgtctttatcctgactgatgtttatcctgtttggctgcgaaataaatataaaattaatatatatgttgtaatgatatatttttataaattattccctgcgtgaattttaataaatttaatctatccctttatacgcaatacatttactttcctcttttgatgatcttaaatgtcttatttttcgtaatgtgtataacaaggaatagtgatgaaatttaaaaaatgtcttctgcctgtggcaatgttagcgtcattcactctggcaggatgccagtcaaatgctgacgatcatgctgccgatgtttatcaaaccgatcaactgaataccaaacaagaaactaaaaccgttaatattatttccattcttcccgcaaaagttgccgtagacaactcccaaaataaacggaacgcacaagccttcggcgcgcttattggcgcagtcgctggcggtgttatcggccacaacgtcgggtctggcagcaattccggaacgacggcaggtgcagttggcggcggagctgtaggcgcggcagcgggttctatggtgaatgataaaaccttagtggaaggtgtttctttaacctataaggaaggcaccaaagtgtatacctctacccaggtgggtaaagagtgccagtttacgacaggtttagccgttgttattaccacgacgtataacgaaacgcgtattcagccaaataccaaatgtcctgaaaagagctaataatcaggaggagtcatgaagaaagtttttctttgcgccatcttagcctccttaagctatccggctatcgcctcatcattgcaggatcaactctctgctgtcgcagaagcggaacagcaaggtaaaaatgaagagcaaaggcagcatgacgaatgggtcgcggagcgcaacagggaaatccagcaagagaagcaacgtcgcgcaaatgcccaggccgccgctaacaaaagagcggcaacggcagcggcaaataagaaagctcgtcaggataaactggacgccgaagcctctgcggacaaaaaacgcgatcaaagttatgaagatgagctacgcagcttagagattcagaaacaaaaactggcgctggcgaaagaagaagcccgcgttaagcgagaaaacgaatttatcgatcaggaactgaagcacaaagctgcgcaaaccgatgtggtgcaatctgaagctgacgccaacagaaatatgactgaaggcggtcgcgatctgatgaaaagcgtgggcaaagcagaagagaacaaatcggacagctggtttaattaatcgatgttagtaacttcaatcctataattcttgaagataaaaaaccctctgtagtaacagagggttttgttcattcatagtgcagggtcaaatcattcccactcaatggtagctggcggcttgccgctgatgtcatacaccacgcgggaaataccgttcacttcattgataatgcggttggaaacgcgaccgaggaaatcgtacggcagatgcgcccagtgtgcggtcataaagtcgatggtttcgacagcacgcagagagacaacccagtcatacttacgaccatcgcccattacgccaacggaacgtaccggcaggaacacagtgaacgcctggctgactttgtcgtacaggtccgctttacgcagttcttcaatgaagatggcgtcagcacggcgcagcaggtcacagtactctttcttcacttcacccagaacacgaacgccaaggcctggtcccgggaacgggtgacggtacagcatgtcgtacggcaggcccagctccagaccaatcttacgcacttcgtctttgaacagctctttcagcggttcaaccaggcccatcttcatctctttcggcaggccgcccacgttgtggtgagatttgatgacgtgtgctttaccggttgcagacgccgcagattcgataacgtcagggtagatggtgccctgcgccagccacttcacgtcttccagtttcagcgcttcttcatcgaatacttcaacgaaaacgcgaccgatgattttacgttttgcttccggatcgttttcgccagccagcgctgacaggaagcgatcttctgccggtacgtgaacaatgttaagaccaaagtgatcgccaaacatatccagaacctgctctgcttcgttgaggcgcagcaggccgttgtcgacgaatacgcaagtcaggtttttaccgatagcgcggtgcagcagcattgcggttacggaggaatccacaccaccagagaggccgaggatgactttatcgtcgcctacctgctcgcggatgcgagctacagcatcgtcgataattttcgctggcgtccacagggcttcacactggcagatatcacgcacaaaacgctccagcatgcgcataccctggcgggtatgagtcacttccgggtggaactgtacgccatagaagcgtttttcttcgttagccataatggcaaacgggcagctttcggtgctggctacggtgatgaagtcggacggaatagcggtaactttatcgccgtggctcatccagacatcgagcagcggtttaccgtctgcggtcagcgcatcttcgataccgcgaaccagtgcgctgtcgtttacgacttcaacctgcgcgtagccaaattcacgttcgttagaggcttcaacgtgaccgcccaactgcattgccatggtctgcatgccatagcaaacgccgaataccggtacgcctgcttcaaagacatactgcggcgcacgcggactgttttcttcagtagtactttccgggccgccggaaagaataatgccgcttggattgaagtcacgaatttgtgcttctgtcacatcccacgcccacagttcgcagtaaacacccagctcacgcacgcggcgcgcaaccagttgagtgtactgagaaccgaagtccagaatgaggatgcgatgcttatgaatgttttccgtcattgacgcttattccgaggcaagtgaaacagataatataaatcgcccgacatgaagtcgggcgaagagaatcaggagcccagacggtagttcggggactctttagtaatggtcacgtcgtgaacgtggctttcctgaatgcccgcaccgctgatacgtacaaactccgctttagtacgcagttcgtcgatagtaccacagccggtcagacccatacaggagcgcaggccgcccatctgctggtgaatgatctctttcaggcgacctttataggctacgcgaccttcgataccttccggcaccagtttgtcggcagcgttatcgctctggaaataacggtcagaggaacctttggacatcgcgcccagggaacccataccacggtaagatttgtaagaacggccctggtagagttcgatttcacccggagattcttcagtacccgccagcatggaacctaccatcaccgcgcttgcgccagcggcgatagctttggcgatgtcgccggagaagcgaataccgccatcagcgataaccggaataccggtgccttccagggcttctactgcgtcagcaacagcggtaatctgcggaacaccgacgccagtcacgatacgagttgtacagatagagccagggccaatgccgactttaaccgcactgcaaccagcttctgccagagcgcgtgcacctgcagctgttgccacgttgccgccgataatttgcagatccggatatttagcacgggtttcacggatacgttgcagtacaccttctgagtgaccgtgggaggagtcgatcagcagaacgtcaacgcctgcggcaaccagcgcgtcaacacgctcttcgttacccgcacctgcgccaaccgctgcaccaacacgcagacggccttgctcgtctttacaggcgttcggtttacgttccgctttctggaagtctttcacggtgatcatgccgatcaggtggaattcgtcatcaaccaccagcgctttttcaacgcgtttttcgtgcatttttgccagcaccacttcacgggcttcaccttcacgcacggtgaccagacgctctttcggcgtcatgtaaacgctaaccggctggttcaggtcggtaacaaaacgcacgtcacgaccggtgataatacccaccagttcgttttcttcggtaacgaccggatagcccgcaaaaccgttacgctcggtcagttctttcacttcgcgcagcgtcgtggttggcagaacagtctgcggatcagtcaccacaccagattcgtgttttttcacacggcgaacttcttctgcctggcgttcaatggacatgtttttgtggataaagccgataccgccttcctgagccagagcaatagccaggcgcgcttccgttacggtatccattgctgcggaaagcatagggatattcagacgaatagttttcgtcagctgggtgctgaggtcagcagtattcggcagaacggtagagtgagcaggaacgaggagaacgtcgtcaaacgtcagagcttctttagcgatacgtagcatgggcaatatctcgaccagagtggttaataaatattgccgcggcattatacagagcgtaaccgattgcatctacccctttttgcaaaaaatgcttgctatccccgaagggcgggttactatcgactgaataacctgctgatttagaatttgatctcgctcacatgttaccttctcaatcccctgcaatttttaccgttagtcgcctgaatcaaacggttcgtctgctgcttgagcatgagatgggacaggtttggatcagcggcgaaatttctaatttcacgcaaccagcttccggtcactggtactttacactcaaagacgacaccgcccaggtacgctgcgcgatgttccgcaacagcaaccgccgggtgaccttccgcccacagcatgggcaacaagttttagttcgcgccaatattacgctctacgagccgcgcggcgactaccagataatcgttgagagtatgcagccggccggtgaagggctgctgcaacagaagtacgaacagctcaaagcgaagttgcaggctgaaggtttgttcgatcagcaatacaaaaaaccacttccctcccctgcgcattgcgttggtgtgatcacctcaaaaaccggtgctgcgctacatgatattttgcatgtgttaaaacgtcgcgatccttctctgccggtgatcatctaccctgccgccgttcagggcgatgacgcgccggggcaaattgttcgcgccattgaactggcgaatcagcgcaatgagtgcgacgtattgatcgtcgggcgcggcggcggttcgctggaagatttatggagttttaacgacgaacgcgtagcgcgggcgatttttaccagccgcattccggttgtcagcgccgtcgggcatgagacggatgtgaccattgccgattttgttgccgatctgcgtgcgccaacgccgtctgccgccgctgaagtagtgagccgtaatcagcaagagttactgcgccaggtgcaatcgacccgtcaacggctggagatggcgatggattattatctcgccaaccgcacacgtcgctttacgcaaattcatcaccgattacagcaacagcatccgcagctccggctggcacgccagcaaaccatgcttgagcgcctgcaaaagcgaatgagctttgcgctggaaaatcaacttaagcgtaccgggcaacagcagcagcggttaacacagcggctgaatcagcaaaatccacagccgaagattcatcgcgcgcaaacgcgcattcagcaactggaatatcgtttagcagaaaccctgcgcgcacagcttagcgccacgcgtgaacgtttcggtaatgcagtaacgcacctcgaagccgtaagcccactgtcaacgctggcgcgtggatacagcgttactactgctactgacggcaatgtactgaaaaaagtgaagcaagttaaagcgggtgaaatgctaaccacacgtctggaagacggctggatagaaagtgaagtaaaaaacatccagccagtaaaaaaatcgcgtaaaaaggtgcattaagccagcacgaattcaacgcgttttttcgatatcaagccatgcccgtgctgacagaagtaatctactgcaccacaggcttttaacacctgcaacggttgatggcagtctggacaaagagctttcatttcaataaattccccgcaggatcggcaacgcgcatggccgttatcctgatcaagcacatgctgacattgtggacaatgcagttccatatgaattcctccggtagccattccctctacattcatagagggaatggcagataaaatacttacggataattatttatttttcttgatgtgcttcatcagacgcttacgtttacgcatctgggttggcgtcagggtgttacgcttattcgcatacgggttttccccttctttgaactgaatacgaatcggcgatcccattacgtccagcgatttgcggaagtagttcatcaagtagcgcttgtaggaatcaggcaggtctttcacctgattaccgtgaatcaccacaatcggcgggttataaccaccggcgtgggcatatttcagcttcacacgacgaccgcgtaccagcggcggttggtgatcttcaacagccatcgtcatgatgcgcgtcagcatagaggtccccacacgacgggtggagctgtcatacgcttcacgtactgattcaaacaagttaccaacaccactgccgtgcaaggcagagataaagtgcacacgagcaaaatcgataaagcccagacggaagtccagcgtttctttcacctgctctttcacttcctgactcaggccatcccacttattcaccacaatgacaagtgagcgcccactattgagaataaagcccagcagcgagagatcctgatcggaaataccttcgcgcgcatcaatcactaacatcaccacgttggcgtcttcaatggcctgcaacgttttgattacggagaatttctctacagcatcggtgattttgccgcgtttacgtacgccagcggtgtcaatgagcacatactcacgtccatcgcgttccattgggatgtagatgctgtcacgcgtcgtgccaggcatgtcgtaaacaacaacgcgctcttcaccaagaatacggttagtgagtgtagacttacctacgttcggacgacccacaatcgccagtttgatcggcagactttgcgggtcgaagtcgtcttcctcttcttcttcgccgttctcttccgcttcaaattgcgcccagtattcagcgtcttcgtcgacttcctcttgcggtgcgagatcttccatccacggcagcagcacatgctccagcagacttaatacgccacgaccgtgagacgcggcgatcgggtagatttcacctaaaccaagcgagtagaaatcaaccactgcctgatcgggatccagaccgtcagttttgtttgccaccaggaaggtcggtttttcacgggagcgcagatgtttggcaatcgcttcatctgccggcatcaggcccgcgcgcgcatccaccataaacagtacgacgtccgcttcttcaatcgccagcagcgactgttccgccatgcgggtttctacaccgtcttctgtgccatcaatcccgccggtatcaatacagataaactcacggccttcaatttccgcacgaccgtacttacggtcacgagtcagacccgggaaatccgcaaccagcgcatctcgggtgcgagttagacggttaaataacgtggattttcctacgttagggcgcccgacaagcgcgaccacaggtaccatgtttaaagcctcatttttataaatcatcagacaacgcacgctatattcgcgtcgttgttaaaaacaggaaaacggcccctgtccaggagccgttttcaaagtgaacgacagagacgattaacgtgtaatagagtacacggttccgtcttttgcctggatcagcagtttgccgtcagcggcaaccggttcagtctggaaaccggaactatcaactttttgctgggcaacgaaacgaccatcttcgacgttaatccagtgcagataaccttcactgtcaccgaccaccaggttgccattatacagcaccggagaagtcagcaggcgatgcagcagatcgctttgtgtccacagcgtaacgccgccatcaatggtcaacgccatcacccggtcattttgatcgaccagatagatgcgattgccgtcgacgatgaaatcattcaccgaacccagttcgcgtttccacataatctgaccactgcgcagatcaagcgccgtcaggttaccattataggccagcgcgaaaacaacgccgttaacaacgacgggagtcgtgtcaacatcgctcagacggtcaatttcggtagaaccggtcgcctgggaaatacgctgctgccaaatcatctggccctgttccatcagcactgcgctgacgcgaccattatcgccccccacgacggccgcaccaaaagccgttgtcggcgcagactcgccacgcaaagagagcgaaggcatatcgaggttaactgtccatttgacagcgccgtcagcttcgttcagcgcttgtaactgaccgttactggtgtggattaacaccagaccgtcgctgaccaccgggcgcgaaagtgcttcacccgcgactttagtttgccatgccacagtaccatcgctggtattcagcgcgtaaacctgcgccttttcgctgccaatgtagacatgcccaccagacacggtcacaccgccagaaagtaatgcaggctctttagagaaccagccatctttctcggccaggctgacagaccagatttctttgccatcatccgcattcagcgcttttactaaaccagcgcggtccgctgcatagacaacgttgtccgccagtgccggatgaagattggaatagaagttgccaatgccgctaccaacggaagtgctccacgccgtggtcggcgtaaactggttttcaacggttggcaatggggacatctttaccacatcttcttcgctgttaaacagcgaacagccgcttaaaagggtaacggaaagcagtcctggcagcagtaatttacgcaattgcatcgggtccctctcagatggacaaattattaattttcatctgcatcatttcgctcagtgccggagtaacatcgcttttcacgcctgcttcccatgcactacgcgcaccttgcttatcacctttgctcagcaatgcttcaccacgcaggtcggcaacaatggcagcccacccttcacctttgatggtatcaagggttttcagcgcggcatcagcctgcttgagctgtacctgaacgcgagcaagacgcagatttatcacggctttgagattttcatcgctcgtgtctgccagcccctgttgtaactgggcggcagctttctctagttcatttttgtcaacaaattgctgcgcaagttccaaagaagccagcgcaccataagtatttttattttcagcagcaaatttttccgccgccgggatgctatccggtttgccttcgctcactgcggtaaccgcattttgataggcaagagaagcggagcgtgcagaatcaacctgatggctgttccagtagcgccagccaatcagtgcgccaacgcccaaaatcaccccaacagccagtgctttgccattttcagcaaaaaagcgtttaaccgcttctacctggtcgttttcgttctcgtaaatttccacgctgtccttctccttccttaacccagtaacgtgcgcaaatgcgcggctacgctatcctgcgcaactgccgtttgctcaccagagcgcaaatccttcactactgctgtgccgttagccacttcagactcacccagcaccacagcaacgcgggcaccccatttatcagcacgggcaaactgtttcttaaagttgccgccgccgtggttggtcatcaatttcacgcccggtaattcatcacgcagacgctcagctaatgccatagccgcagattgtgtatcagcacctgaagccaccaggtatatatcgacaacaggatcggctttaaattccggattaacggcctgtactaacaatacaagacgttcgaggcccatagcaaaaccgacagccggtgttgcacgaccgcccagttgttccacaagaccgtcataacgaccgcctgcacacacggtgccctgggagccgagactgttagtcacccactcgaaaacggtacggttgtagtaatccagaccacgcaccagacgctggtttacggtgtaagcgatccccgcgctctccagcagtttgcacagaccggcaaaatgctcacgagattcctcgtccagatagtcacctaatgccggagcgtcgttgagaagcgcctgcacttccggattttttgaatccagcacgcgcagcgggttagtgtacatgcggcgtttgcagtcttcgtccagcttttctttatgctgctcaaggaatgccaccagcgcatcgcggtaattggcgcgtgcttccagcgaaccgatagagttcagctcaagagttacgtgctcggaaatacccagcgcgcgccaccagcgggcagtgagcataatcagttcagcgtcgatatccggaccttgcagaccgaaaacttcgcagcccaactgatggaactgacgataacgccctttctgcggacgctcgtgacggaacatcggcccgatataccacagacgctgttcctgattgtacagaagaccatgctcgatgccggcgcgtacacagcccgccgtcccttcagggcgcagagtcaggctgtcgccattgcgatcctcaaaggtgtacatctctttttcaaccacgtcggtgacttcaccaatcgcacgtttgaatagcggggtctgctctacaatcggcaagcggatttcactgtaaccgtagctgccgagcacgtttttcagtgtgccttcaatgcgctgccagatggccgtttcgccaggcaggtaatcgttcatgccgcgaatggcttgaatgttttttgccacgtttattctctttctgaatataaaaatgaaccctcaacgcttccctcaatgtttcgggagccatgcgggttcaatcatacacgggaagcgaggcgcttcccatcacgttattatttttcaacctgctgaacgtcaattcgacgcgcttcgtccagctgactggctttcgcacgaatgcgtgcttccagctggtcgatcatatcgttgttgtccagacggtctttgcgcacgccatcttcatagaggccgcttttcttgttgccgccggtgacgccgagtgtagaaaccagcgcctcacctgggccattcaccacgcagccgataatcgaaacgtccatcggagtgatgatatcttccaggcgttgctccagcgcgttaaccgtaccgataacatcaaattcctgacgcgaacaggtcgggcaggcgatgaagttgatccctcgcgaacggatacgcagcgatttcaaaatatcgaaaccgactttgatctcttcgaccggatcggccgccagcgatacgcgcagcgtgtcgccgatgccttcagacagcagcagacctaaaccaatggcggattttactgccccgctgcgcgcaccaccggcttcggtgatccccagatgcaacggctgatcgatctgttttgccagcaaacgataagactcaacagcgaggaagacgtcagacgctttcacgctgactttgaactgatcgaagttcaggcgatcgagatgatcaacatgacgcatggcagattccagcaacgcctgcggcgtcggttcgccatacttttcttgcagatctttttccagcgatccggcgttaacgccaatacggatcggaatgtttttatcgcgcgcacagtcaaccaccatgcgaatacgctcttcattaccgatattgccagggttaatacgcagacaatcgacgccgtattccgctactttcagcgcaatgcgatagtcgaagtggatgtcagccaccagcggcacgttaacctgctgtttgatgagtttgaacgcttctgccgcgtccatcgtcggtacggatacacggacgatatcagcgccaacgcgttccagcgccttgatttgattgaccgttgcttcgacgtctgtcgtacgcgtattggtcatggactgtacggcgatgggagcaccatcgccaatcggcacattcccaacgtaaatacgtgttgattttctacgttgaattggagcctggttatgcatgaaaaatctcccgcgttacccgtctgttactgcgccggtgattgttcggcattgagggtcagacgcgcaacctggttagttctgataaaacgactcagatcgacaggtttcccttgatactggatctgtactgcggctggcgcaccaattttcagtttgtacggtgcctggccggttaagttcaaattaccgtctttacgctgcataccgctaaacaattttttaccggtagcatcagtgacctccagccagcaatcggcagtaaagttcatcaccagcgcattcggatcagccaccggcgtggtcacgccagcctgatcggttggcaacggcgcagcaccatctggcgttgttgctgccgttggtgccggggtcgcggcggtatcaacatttgcctgcgaaggcgaaacaaccgcattctgttgcggatcaacagctggtgctggcgcagttacggcaggtgtttgcgtgttggttgcggtagtatccacagacgctggcggcgtggacgttgtagccgggtctgtagttgtcgacgtatttaatggaacactctgcccctgctcgctattactgctcagttccgccgaagattgatcggccatagtggtgatctcttcctgctgagctttgcggtcttgccaccaccaggcaccgctcaggccgataaccacaaacaacaccagccaagtgaaggtcatcagccagccgtcgcgttttttgcggcgtttaccgagggaaaaactctgcatcggcgcaacttttgcagcccgaagtggagcctgcttttccagccctggcagcagttcttcttctggaatatgtaccagacgcgcataagagcggatatatccgcgcaggaatgttgaagcaagatcggcgggtgccttatcttcttcaatgtcgcgtaccgtggaaaccttcaggcaaagtcgctcggcaacggcctgctgactaagtcctagttgttcgcgagcattacgcaggcgagcgccggtagtaagtgcttcattttggtcgtgcgtggcttcagtattcattcgctgcaggtacgtttaaatgagaattgagatgccggtgaaccatcatgctcacccacaccgcgaaacatccgttaagttaaccgttatcatacagtataagaccgtctgtgtgctcgtgacaaagcccacattcactaaggctaacttactgttgcatcgttacatactgccttaaagtcagcaaaaacgcaccgttaatattgaccagacaattgcaacttaatacttcattcataaaacattacgccacggtacataaagtaaccgtggcgtaatggctatcagaccgctttaatgtcgatggcttcaccctgcatccgtttacgcagggtacgtttcgtacggtcgataacatcgcccgccaactgaccacaggcagcatcgatatcatcaccacgagttttacgcacaatagtggtgaaaccgtagctcatcagcacttttgagaaacggtcgatacggctgttcgagctgcgtccatacggcgcacccgggaacgggttccacgggatcaggttgatcttacacggcgtatctttcagcagttccgccagttggtgcgcgtgttcagtgccgtcgttaacgtggtcaagcatcacgtattcaatagtgactcggccctgattggcgttggatttctccagataacggcgcaccgcagcaaggaacgtttcgatattgtactttttgttgatcggcacaatttcgtcacgaatttcgtcgttcggcgcgtgcagggaaattgccagtgcaacgtcgatcatatcgcccagtttatccagcgccggaactacaccggaagtggaaagcgtgacgcgacgtttagacaggccaaaaccgaaatcatcaagcatgatttccatcgccggaacgacgttgttcaggttgagcagcggctcgcccatgcccatcatcactacgttagtgatcggacgctgaccggtgacttttgctgcgccgacgattttcgccgcacgccacacctggccgataatttccgacacccgcaggttgcggttaaagccctgctgggcggtggaacagaatttacactccagcgcacaccccacctgcgaagagacgcagagcgtggcacggtcgtcttccgggatatacaccgtttcgacgcgctgatcgccaacggcgatcgcccatttaatggtgccgtcagatgaacgctgttcttcaaccacttccggtgcgcggatttccgccacctctttcagtttgccgcgcaacactttgttgatgtcggtcatctcatcaaagttgtcgcagcaatagtgatacatccacttcatcacctgatcggcgcggaagggtttttcacctaaatctttaaaaaactcccgcatctgctgacggttgagatccagcaggttgatttttccatctttcgtggtgacgttttcaggtgtgactaattgttcagacatatgctattccggcctcgttattacacgttatggcccctggagggttgaaaaaagaaacgccccggtgagcggctgctcgtccgggggcgctgcattgtacaaattctggcgcacggatgccacgtttgcacgcggcatttacgaaattattaacgggtgcgcgggcacacttcgccttcgccaaagaaataagcgatttcgcgagcggcagattcgacggaatcagaaccgtgggtaccgttttcggtcaggctgtcagcgtaatcagcgcgcagagtaccagccagtgcgtttgccggattggtcgcgcccagcagatcgcggtgacgctgaacggcgttttcaccttccagcacggaaaccacgatcgggccagaggtcatgaattcaaccagaccatcaaagaacggttttccatcgtgttcagcataaaagccacgtgcctgttcaacggtcaggtgcagcattttggtgccaacaattttgaaccctgcagcttcaaagcgcgcaaagatattaccaatgacgttttttgctaccgcgttcggtttgatgatggaaaaagtacgttcaatagccatttttacctctgtaaattgttctgttgttgtctgtaccagcgtacgagatggcgcggattataatgagcaacagggccgttgactattgatgaaggtaacatttttttaaaataaaatgagttttagcaacaatcagggacaaaacagactattgcatgacaaatttcactgtcgcgatttgccccacgtcatccatcaccagcaattgataatcacctttatccgtcaaatgcagggtcacgttgcgcccgcgttcagttaacggttcgccattcagaaaccaccagcgttcacctgcccctccacttgattgcaacggcaaagtcgcttccgctgcgcccggtaaacgtttaataatcgcgccatcgcgaacgcctgtcagctgcagcgggagctgggcatcgtgaccgtatggcgggcaacttgtcgaggccggtggtaagcgcacagcgcgacgttctgatgcgggcagccagggttccagcggtagcggccagacatttatcatttcttgtcgcgcttgcgggcaatcagcggcaacacgtttgccattttcatccagccagatggggaaacgaatgccattaatgccttcctgctccggcagtaatagagttggcggctgactcccgtccagcagccaggttgccaggcggcggcgacagttaccgtcaccttccggcaaagactgtccgcccggccagcagataacgccacgagtgactgagttcgggcgcgggtcttccggcagattcgcactgcgcgacagtaagatattattgacctgattcaacaatggtacggcactggcaaagccaaactgaccaacaacgggcgtgccgtccggtctgccagtccagatcccaatgacatagcgagcgttaaccccaatcgcccaggcgtcacgatagccatagctggtgcccgttttccatgccagtggggcgacgcgcggcaaggcactatccggcaagggttgcgcttcatcagccataatccggcgaatgatccacgccgcccccgacgacattaaaggccgttcaagcagcggatcgtcaggctgtaagcgcaatttgcctgccttgccgtggcgagcaaacgcggtatacgctgccgccatatcttccagttttgcaccagcgccgccgagaatgagtgaaagattcggcgcagcaccgttgggcaaatataacggcaatccaacattgcgtaactttgccgcaaaccgtttcggtccataggcttccagcacctgcacagcaggtaagttcagcgagcgcaccagcgcctcgctcatgctgatcgggccatgaaaaccgctatcaaagttacctggtcgataatcaccggtgcgccgggggacgtcttgcagcagtgatgccgggtggatcaagccttcatccagcgccagaccataaacaaacggtttgagcactgatcctggcgatcggatcgaattgaccatatcaacatgaccaaagcgtgaatcatcgttgagatcaaccgatcccacccagccgcgaacacgcatatcggtatgatcaaccacgatcatcgccagtgagctgcgcggtggcaaccgccctttccagttttgcgccagttcttccagacgtcgttgaagaccggcatccaacgtagtagtgattttgtcgcttttgcttttaccgagcatcatgcgcgaaaacagcggtgccagttgcggcatttgtcggggggccagccagatgggttcttcccttgactcttttacctgctcacgggaccacacaccttgcacggccatccgttcgagcactttattacgcgcggcttcggcacgctccggccaacgatccgggcgaagacggctgggcgcttgcggcaaaaccgccagcattgccgcctcggaatagcttaaattcgcaggcgattttccgagataagcccaacttgccgcaccgatcccctgcaacgtaccgccaaacggagcgcggttaagatacaaggtcagaatttcacgcttagacagatgccattccagttgcaacgcgcgccagagctggcgaattttgccgccaaatgttttggggtgaggatcaagcagacgagcaacctgcatagtgagcgtgctgccaccggaaataacccgtcccgaagtgagatcttgccatgctgcgcgcgccaccgagaatggattcacccccggatgcttccagaaccagcgatcttcataattgatcagcgcttcaaggtaacgtggagaaacatcttcgattgttaccggataacgccagatgccgtcagcatcggcgaagcgccagagcggcgtaccatcctgcgccacgaccactcgtgcgggattgacttcatgcagcggtagaggccagagtttatctgctccccacgctgcaagaaaaaggagaaagggcgcggctgccaacgttatccagcagccgcgtttggttaacaagcgaggcatttacggtctgacaatcagcagatcttcagccgcgccggtcgcccgccattggggaacatacattgattccaccatcggttgcggtacctgatacgttcccggcgtcaccgcccgcgccagatacaccagcgttaccggttggtattcatcaacggcaaccgccgccacaaagcgatcgtcacggaactcaatgtgcttaatgctcgcctgctgcatctggttcagtaagttctgcacttcgccaccactttgctccaggctggcgctaccgttcgccagattctggttttccagttccagacccgcaggcagcagatccacgactaacgcatccggcacgctgttactggcttttacctgcaaccacaccagcaccagatcgccgctacgtaacgagtccagcgatttgctcttaccatcagtaccaagaatatgacgctcgatttgcagcacattgttcgccggtaaaggtgcggattgcggataaccgctggcatccatacgcaaccataacggctgatcgccactgttgctcacctgcaaggtgacaagttgatcgctattcagattgctgttttgcgctttctcgcctgtcagctgctcagctgagaaagaggtttgcgcctgccatttaccgggtaaatcctgaatcgtacgggcagccaggaacaacgcgttactttcctgcgtcgatagccagcgttcaccaaacgcctgctgcgaaagtgtgttcagcaaagtgtactgctcatcgggtagcagtttattttcttccagcaaggagagcattaacgcgttgtcgcgcagtgaactaccgtaatcacccagccatatccgctcatcactattacgcggcgttttcagcgccagcgcaatcgcttcttcaccacgcgtcgcatcacccatggttttcagcgcaacgccaagttgcagcagcggtaaaccagaagcggcatctgcacgatgctcccagatttcacgcagcgcacccagcggagccttttgctgacgggccaacaccagcgcagcgtaagactgtacggcgaatttactggctttgagattatccgcgtacgggatcgacatcatgcccggatcttgtaaatagcgcagcagacgctcattaccccggttaatggcgtctgtcggcacgctgtaaccctgttcgcctgcgcggaccaggaaatccatcacgtaagccgtcagccagtactcttcgtcaccgtttttatcccacagcgcaaagccgccgttatcacgttgcatttgcagcaaacgggaaatgccgatatcgaccgatgcacggcgtttctcatcactgtcgcctttgatgcccaacgcctgcagttgggctgcgttggtataaagtgacggaaacaggccgctggcggtttgctcaagacagccgtacggatacgcttttaactctttgatataacgtgcgatgttcagcggtggtttgccgctcaacaacaattgcccttccagcgtaacaggcgagaagttttgcaatccatccgccggaatcgcccatgtctcaccaggctgtaacgccgtaccgtaattaaccgtttgtgccgggaacgccggacggacgccgattttccactgcttatgctgatcggcaacggtttcacccggtaacgctaacccgctaatggtggcctgaatttctccatcgccataacccggcaatgctcgcaccgggataaacagcgtagtacgcacacctggcgctaattcaacggctgcgggtgaatcgctgaccagttcaagcaaaccactggcggtcagggcaacgttcagtttttgcggtttatcggtaagattagtgatatccagcgtcagacgcgaggtatcgccactcgccataaagcgcggcatgttcagttcagcaatcaccggtgcggcaactatcactttactttcgttgctaccgaagtcatctgccgtccaggcttgcgccatgacgcgcaattcaccgttaaaatcgccaatcggcagtgtaaccgagccttcgccctgttcgttgagcgttaccggcagcgcctgctgcacgacaatattgacgtgattgaccggcggtttaccaccacgtttcagctcatcaccatcgccaccgaaacgcagagctgccagacgcccctgaccttcaataacctgaccgtaaatatcgtaaatgtctgcgccatagcgtttctgaccaaagaacgcctgccacggatctggcgtgacgtagtcagtaatattcagcacaccactatcaacggcagacaccagcacattcacctgtttaggcttctcgccatttttagtgctggctttaattttcacggttaatggttgattgggacgcatttttgctggtgtttccagcgccagatcgaggcgacggttttcatcgccaagcggcagatgcaacacaccaaccgcgcgttttggcgtcgcggagcgagatttatcgccaggacgtaccaccagcgtacttaaatacagatcatgacgattccaggttttatcgaccggaatcgtcagatccagcccttgagcccgaacatcaatctcttgccaccacagcggcccttcactggactcgaccatcgcataacctttacccgccgttggcgcggcgatatgcaacttaatggtgtcgccagggcgataactggctttatccagtttcagcgtgacacggtcgggtcgcactgcgccgctaccgtcgctgttgtcctgccagctatagccagcccagaaacgaacactactgaccgcttcattcggcgctttgacttccagacgataagcgccccactctaccggaaaactgaccttgccggtttcgtccgctttcagatccagagtttgttcattttcgatcagatctttttgatcaaactgtgactgccagccttcatcttctgaccagttccagtagtaatcgcggcgttcgcgaatcaggcgcacctgcaagcccgacacggcttttttcacgccttgcgcatcgctataaacgatgtcaaaagcggcgttactgccttcatcaacaatgggctgtttcaccgtgctgtcagtacgataatcgtaaaccgatttcgaggcgaactgcggacggatccccggcaatgcatcggcaggccagatagcctgctcagcgcggcgcgtcaccgggcgaccgcccgattccagcaaactaccctggaaaataacctgtaatggggaatgcgtttccttccactggctttctgtagaaacttcgccgcgccctttatcatccagcgtcaactgaacttcatccagcgtgcgggaaagattttcggcagctatatcgccgaattcaaaaccaggtaaggctgacacagcttcacgcagtgggcgcaggaaaagttgcccttgcaaagtattaccattagcaggtgcaccatacaggtagtaccccaccacggagaatttcacttcatctttcggcgttagcggggttttctcaccggtcagattcagcgccatgcgctctggcataaaatcttcgacgtggaaatcccacatccgatactgattatcgcccgtgttagcgcgaatatgccacataccggttgccgcattgctatcgagtggccaggtaaagtggtagaggccattctccggctgactaacgacgctcctgagtacctgcccatcgggtttaatcacgtctaacttgatgggttgattgggcaacgctttaccgtctgcatcacgcagcaaaccattgaggattaccgtttcacctgggcgataaagatcgcgtgggccaaacatgaaaaactgtttgctatagcctggcgcgccagcaatgttaaattctgctaagtccagcgccggaagttttaaatcgagtagcgttgtctgaccgtctttacgcgccaacagtaatgccgcgtttttatcattttccagctgcacatgcccctgagcgtcactggttgcctgagtcagagtctgccctttctcatttaataaagagacttcaattccttgctgggccgcgccgttttccagactttgggtaaagatatccagacgattgtgataacggtgagctgaaacgccgatatcacttaacgtaaacagcgtcgcgggattactgtaatcgtaacgtccagcctgattcatcacagccagatacacgcccgcctgctgaagcggtttgatatcgcccagcggcagcaataatttttcacgggtgttacgcgcaggattgagatcaaaccgtccggtgtagaccagatccgccatctgcagcagtttgtctgactgccagttcgccagcgaattgcggtattcccattggctaatgaatgctggcagagattctggcttaacgcggaagaagttaacatcgacattattaacgttgagcgccattaccggcagcccttcaacgactttgccaggcagcagcgaaccacggctggcaaaaccgacgctgggttggatgtcgcgggtagttatagttttttcgtaatctttactgaaggttgcgttgttgagtgctttgacctccttgccaatagtaacgatcaaatcacgtttcggttcgaggtggcgtaaacgtaactctttaagattatctgacagctcccaggcaccatccactttgccgctttttttatcgacgacatgaataacgcgtgagaaatcctgatccgggtcgagagggatggagaacgtcagcaccagcgtggctgcaccatcaagttggacttcagagagatccagcaatgtcagcaccttaccggcactctgttgggccagtttttgtctctccggcacggagagttttgctgaactcgcgttttctgaagaggccgctttagtaacttcagaaggcgcatcttttttcaccgctgttggcgcgttatcgttgttgtcgcaccctgccagcgccagcattagcatgcaggcggctacgcgtaactttttcatttttcatccctgccacaatggcccgttagcaacgtcgaataattattatgcgtgagaatttacgttatgtaattcagtatcacgcccatacaatccgaattttagtgagaattgtggctcagacagccaaatcagcctcttttgcttgtcgcttttcactaaacatccgacaatttagcctaaccccggcaaaaatggagatgcctatgtccacgacatggtttgtaggagccgactggctcgccgaacatattgatgacccggaaattcagattatcgatgcccgcatggcgtcgcctggacaggaggatcgtaacgttgctcaggagtatctgaatggacatattcccggcgcagtgttttttgatatcgaagcgctttctgatcacacttccccgcttccgcacatgctgccgcgcccggaaacgttcgccgtggcgatgcgtgaattaggcgttaaccaggataagcacctgattgtctatgacgaaggtaatcttttctcagccccacgagcatggtggatgctgcgcacctttggtgtagagaaagtgtcgattctggggggtggacttgcaggctggcagcgcgatgatctgctgttagaagaaggtgcagtagagctgccggaaggagagtttaacgccgcgtttaatcctgaagccgtggtgaaagtaaccgatgtattattggcaagccatgaaaatacggcgcaaattattgatgcccgcccggctgcacgttttaacgcagaagttgatgaacctcgcccaggtttacgtcgcggacatattcccggagcactgaatgttccgtggacggaactggtgcgcgaaggcgaactaaaaacgaccgatgaactggatgcgatattttttggtcgcggcgtcagctacgacaaaccaattatcgtcagctgcggctctggtgtaacggcagccgtggttttgttagcactcgcgacgctggatgtgccaaacgtgaaactgtacgacggcgcatggagtgaatggggcgcgcgggcagatttaccggttgagccagtgaaataagtattttacaggcaataaaaaaccgccgaatttggcggttttttattgctagtctggttcgcggcctttccagcaggttgacttgtgttacatgagcaacgcaggtgcttcacagcaaaacaatactcaccagtaactctctttttgtcaagcaaaagagagtaattattgtttatttagcgtattatcgacaccggccctttccgccgtgttcggtaataaaataacctggcttattagtccgaattcagacaaatataaataaatcctgctcaaaattaaaaattctaaccggtaaaagatattacttaaacatgtaaattcactttcctttaaaaaacaaaaaaccgccaaaatcaggcggttttttgttgctggtccggttcgcggcctttccagcaggttgtattaccgtagtaatgcaagcgcgtctcagcggagacaatactcgccagtaactctctttttgtcaagcaaaagagagttattattgttctgttagtgtattatccactgcggccctttccgccgtctcgcaaacgggcgctggctttaggaaaggatgttccgtggccgtaaatgcaggtgtttcacagcgcttgctatcgcggcaatatcgccagtggtgctgtcgtgatgcggtcttcgcatggaccgcacaatgaagatacggtgcttttgtatcgtacttattgtttctggtgcgctgttaaccgaggtaaataataaccggagtctctccggcgacaatttactggtggttaacaaccttcagagcagcaagtaagcccgaatgccgccctttgggcggcatattttagattatccgattctgtttaaagtcacgcaaaaaaccaccccagcgacgttcatagaatggcgcaatatgttcggtaataaagtggctaattcctttttccccttttttcacctgacaaatatcgattggttcatcgccaggtaatgtatcggtcgctacacttcccgtcgcctgaataatttcttcgatatcaccatcggcttcaatgccaataagtaaattaggctgtgcctcttcgttctctttaattgaacaaataaaagcacgcttcaccggcttaatggttttaaataaggtggtgagtgaatcaatcatttgtgctggcggctctgcgacttccgataatatcagcgattcaccgccttccaggatttcctggctgctcagcggatttccctcttcaccaatcaacaaactgatttcacgcggcataaattctttaccggttggcagtttggcattaaggaagagcgtttcgccaagtgtcatctcaaacagcgtgcgaacgggcattacgacaaatgcctgttcgtcttcaaccgcctgttgaagtgcttctaacgaggtgaaaaaaggaatgacgctggtgccgtcttctttttcccagtgctgtaaatcaagcgcgctatcttcaaccacagcctcgccctgcgccgccgtaccaggcacccagacggtggattccagtagagtacggaaaaaggccgggcggtgcgccggttcagttgctgctttttccagcaggtcttcaagttcgttttttgtttcggacataagaaccacaattcattcaacgttcggggcgcaaatgcctgatgcgctacgcttatcaggcctacaagggattcgcaatttgttgaatttgcagaatttgtaggccggataaggcgtttacgccgcatccggcatattagtttacgccgttaacagattagctatcgtgcgcacaccaagtcccgtagcgcccgcagaccactgttcaaccggcgctttacggtaagtcgccgagcagtcgatatgcagccagccttgctgatagttctcaacaaagtgcgacaggaagcccgccgccgtgctcgcgcctgccggatacgccgcgcttccggtattgttcagttcggcaaagttagacggcagctggctgcggtggaactccgccagcggcagacgccagaacggttcgttctcctgcgcggcactcgccagcaagcgaccggccagcgcatcgtcaaaactgaacagcgcgtgataatcattacccagcgcagttttcgccgccccggtgagggtcgccgcatcaatgatcatttccggtttctgcgcactggcatcaatcagaccatcggcaagcaccagacgcccttcggcatcagtgttcatcacttcaacttttttaccgttgcgataggtgatgatatcgcccagcttgaacgcattgccgctaatcaggttatccgcacagcagaggaacagcttcacgcgcttgttcagtccgcgcgtaatggcaaatgccagcgccccggtaaccgttgccgcgccgcccatgtccgacttcatcgagtccataaacgcagtctgtttgatgctgtagccgccggagtcaaaagtgatacctttacctaccaggcacgcgtacactggcgcttctttatcgccagttgggttgtaatccagcgccagcaataccggagaacgttctgaaccgcgtccgactgtgtgcagccccatataaccttgctcacgcagatcttcgcctttggtgatccgataagtcacacgatcgcccgcgacgttgctgatcagatcaacagcacgctgtgccagttgcgatggtcccaattcttctgccggtgcgttgatggtgtcacgcacccagtcgatgatcatcaggcggttatccagttcctggcgctgggcatcgtccagatccggccacaccactttacgcgtgcctttcggggctttgtaaccttgccagaatgcccagcagcgatccgcatcccagccttcaccgcttaactgaacatgcttgatgcccagaccgtcaatcttgcgcgccgcacgctggatcagccccagatcgtctgccccgttcaaatgcagggtaatgccgtcattattaatgctgtaagttgctttttctccccagcgcgcgtcggcaggttgggtagagagggtaatcttcatcgcttctgtcattttagttatccttctttgtaaaagggccgccagttggcagccccaggatttttccgctaaatgattcgcgttgcaggaaggcggcaagtgagtgaagccccaggagcatagataactatgtgactggggtgaacgagcgcagccaacgcatctgcggcgtgaagcatgacgcggaaattattcggcctcgtccagccagactaacaaaatcgcttcgaggattttctcgttggatgcctgcgggtcgtcgtcgaaatcttccagatcgcaaatccactgatgcatatcggtgaatcgaaccgttttcggatcaagatcgggatacgcatcgtacagtgcttcgccaatttcgcggctatcggtccacttaagtcccatactaacctctgttaatgctcacgcgcatggttgatagtgtaacgcgggatttcgactactaaatcttcgtcggtaacgcgcgcctggcagcttaaacggctttccggctccagtccccaggctttgtccagcatgtcgtcttcctgctctgagctttccggcagtgagtcaaaaccttcacgaacgatgcagtggcaggtggtgcaagcacaggatttttcacaggcgtgttcaatctcgataccgttacgcagagctgcgtcgagaatggtttcaccgctattagcttccagaacagcgccatcagggcagagatcctgatgaggcaaaataacaatctttggcatattaaacctcgtccacggaatggcctttcagcgcacgacgaaccgactggtccatgcggcgagcggcgaaatcctgggtttgtttgtctacgtttttaatcgcttgttcgatggcgtcaacatcatcgccctgcgccacttcactcaggtgagcggcagcatcgtcaatgacctgacgttctgcggcgcttaacagcgcggcatcagcagccagcgcgccgtgcagactttccagcacacgcgccgcttctactttttgttctgccagcattcgggcttttacgtcctgctcggcatagctcattgagtctttgatcatcgaagcgatttcgctatcggtcagaccgtaagacggtttgacctgaatagacgcctcaacgccggtggatttctccatcgccgtcacgctcaaaagaccgtcggcatcgacctggaacgtcacgcgaatatgcgcaccgccagccggtagcgccggaataccacgcagcgcaaaacgcgccagtgagcggcagtcctgcaccagttcgcgctcaccctgcattacatggatagacatcgccgtctgaccatctttaaaggtggtgaaatcctgagcgcgggccaccggaatagtggtattacgcggaatcactttctccaccaggccgcccatcgtttcgaggcccagcgacagtgggatcacatcaagcaacagcatttcgctgtctggcttgttacccaccagaatatccgcctgaatcgccgcgccaatagcgacgactttatccgggtcgatggaagtcagcggtggacgaccgaaaaattcgcctacccgttcacgcaccagcggcacgcgagtagaaccgcccaccatcaccacttccagcacttcatcagcttctacacccgcgtctttcagcgcgcgacgacaagccagtaaggttcgttttaccagtggcgcgatcagttcattgaattgttcacggctgatttcgccctgccagcccgcaacgttaacggtcacggagtccgcatcgctcagcgcgattttggctgcaatggcggcatccagcagttcacgctgaacgcggttatcgctacgatcaggaatgcccgcctgctcgcgaatgtaatccgccagcagatggtcgaaatcatcgccgccgagcgcggaatcaccgccggttgccagcacttcaaacacgccgcgacttaagcgcagaatggaaatatcaaacgtcccgccaccgaggtcataaacggcgatcacgccttcctgaccggaatccagcccgtaggcgatagccgcagcggtcggttcgttaagtaagcgcaggacgtgaaggcccgccagacgcgccgcgtctttggtgccctgacgctgggcatcgtcaaagtacgccggaacggtgataactacaccatccagctcgcctgccagggcttcagttgcccgcgccgccagtgctttgaggatgtccgcagaaacgcgcaccgggttcagcagccccgccgccgtttcaatcatcggcaggccgttttcgctggcctggaattgataaggcagatgcggatagcgttgctggatatcagccagcgagcgtcccatcaggcgtttaacagaactaattgtgttggcggtatcgagcgctgcattagtacgcgcgtcataacccaccgaatgcccttgctgttgatagtgaacaacagatggcagcaggtgacggccttcatgatcggctaacgtttcggcctgaccgctgcgcactgtcgccaccagcgagttggttgtgcccaggtcaataccggccgccagacgacgctgatgcggcgcagcactcaaaccaggttcactaatttgtaataaggccatgtttagcttccagaaattaaaaatcgagcagtttttcttcgagttgttcggcactgcttcgcagtttatcgagaaaacgcagcttacgcacggtatccgccgccgcgtcccacgtctcgttgtctaactgttcaaccatcaactgatggcgggtatcaaacatctttttcacacgtttgataaagctttccagccgcgcttcatctttcgcctgttcgatctcgtccagctcttcgcgcagctccaactgttccatcaggaacgcggtgtcgcgcacagtatgctgctcgctggcgagatcaaagccgtgcaaagaaagcaaatattccgcgcgcattaacggatgacgcagcgtttgccaggcctggttaatggttgcagattgctgtacggcggcgagttgttccgcctggcttccgctggcgaatttatcaggatgatactgacgttgtagatcctgaaaacgcaggctcagcgcctgggtatcgagttgatagcgggcaggcaagccaaagagggtgaagtaatccataacattctcagggctgcgatccgccgcgataacggcgaatcaggtaaaacaaaccccacgcgcaggcgaccacggtggggttatcggtatgcgcatcaaacgtggaagctttcgccgcaaccacactcatctttgacgttcgggttggtgaatttaaacccttcgttcaggccttcttttacgaagtccagctgcgtaccgtccagaaattgcaggctcttgccatcgaccacgactttcacgcctttgtcttcaaacacgatgtcttccggcgtcggttcgtcaacaaattccagtacataagccatacctgaacacccggaggttctcacgcccagacgcaggccaaaccctttaccgcggttagccagaaaggtatttactcgcgctgctgcactgtcgctcagtgtaatcgacataaccaaacctcaactcttattttgcttcacgtttgcttttatagtccgcaatggcggctttgatcgcgtcttctgccagaatagaacagtgaattttcaccggcggcagttcaagttcttcagcaatatcggtgtttttgatcgcctgcgcttcgtcgagagacttccctttcacccattcggtgaccagggagctggaagcgatagcggaaccgcagccgtaagttttaaaacgcgcgtcttcaatgataccttcatcgttgactttaatctgcaacttcatcacgtcgccacaggccggtgcccccaccatgccgctgccgacgttctcgtcgttgttgtcaaaggaacccacgttacgcggattctcgtaatggtcgataactttttcgctgtaagccattataaattctcctgattccgataccgattaatgatgagcccattcgatgctgttcagatccacgccctgcttgtacatttcccacagcggagaaaggtcacgcagacgaccgatggatttacgaactaactcgatggtgtagtcgatctcttcttcagtagtaaaacgacctaaagagaaacggatagagctatgtgccagctcgtcgttcagccccagcgcgcgcagcacgtaggacggttcgaggcttgctgacgtacaggcggaacctgaagaaactgcgaggtctttcagcgccataatcagcgactcaccttcaacgtagttgaagctgacgttgagaatgttcggcgcaccgtgttccaggtcaccgttcaggtaaacttcttcgatatctttgatgccgttccacagacggttacgcaggccgcgcagacgttccatctcggtcgccatctcttcttttgcgatgcgataggcctcgcccattccgacgatctggtgaacaggcagagtgccggaacgcataccgcgctcgtgaccgccgccgtgcatttgcgcttcgatgcgtacgcgcggtttacgacgtacatacagcgcaccgatacctttcgggccatagattttgtgaccggagaaagacatcaggtcaactttcaactggctcaggtcgataggcagtttacccacgctctgggttgcatcaacgtgatagataatgccacgagcacggcacatttcgccgatagccgcgatatcctgcaccacgccgatttcgttatttacgtgcatgatggacacgaggatggtgtcgtcacgcatcgctgcttcaagttctttcaggtcgataatgccgttacgctgcggtgccaggtaggtgacttcaaaaccttcgcgctccagctgacggcaggtatccagtaccgctttgtgttcggttttgctggtgatgatgtgcttgccttttttctgataaaagttggctgcacctttgatcgccaggttgtcagattcggttgcaccagaggtaaagacgatttcacgcggatcagcgccgaccagatcggcaatctgattacgggcgatatctaccgcttcttcagcctgccagccgaaacggtgagaacgggaggccgggttaccaaaggttccgtccatcgtcataaactgcatcattttctcggcaacacgcgggtccaccggcgtggttgcggagtagtcgagataaatcggtaatttcattgctctataaactccgtacatcactcaatgcaaggaatcaggctaccggctggatgtacgaccgtgtttacggagtatttagcactccggcctgattctgaattctttttattaagcgcgtaacttaacgtcgatcgcgtcttgtgtgcgggtgcgtggcgcgtcgtgagtatgctgacgaccagacacatccagcacttcctggttattaaccagttcgcctaaagtaatgttgttgagaaaaccggtgagacggtcgctcaaatcacgccacagcgcgtgggtcaggcatttatcgccgccctggcagccgcctttaccctgacaacgggtggcatctacagattcgtcaacggcgctaattacttcgccaacggcgatgctgctggcatctttgcctaacagataaccaccgcctggtccacgtacgctggaaaccagaccatttttacgcagacgggaaaacagttgttccagataagaaagggaaattccctgacgttcggaaatatcagccaacggtaccgggcccgcttcagagttgagcgcaacgtcaagcattgcggtcacggcatagcgccctttagatgtcagtctcatgtcttacttcacctcaaactcgcccctgcccggggttttttattgtaaaagtgggggtattgcatagcagggtcaagtctgacattcccgagtaaattggtcaactatttacttgactgatttagtcgggtatttaaccttcagtgccatttttttatcgtggcgtttgtacctgttgtcggatgcggcgtgaacgccatatccgccctggggttctgtacactgtaggcctgataagacgcattacgcgtcgcatcaggcaacggctgtcggatgcggcgtgaacgccttatccgacctacggttctgttcactgtaggcctgataagacgcattacgcgtcgcatcaggcaacggctgtcggatgcggcgtgaacgccttatccgacctacggttctgttcactgtaggcctgataagacgcattacgcgtcgcatcaggcaacggctgttattcggccttgttacctttattctgctgctcaatagaagccagaatcccgcgcaggatattcaactcctggctttccgggcgcgcacgggtaaacagacggcgcaatttattcatcacctgccccggatggttttcacggataaaaccggttgccagcagcgtttgttccagatgaccataaaaacgctccagatcatcgaccagcggatacggcgtctcttcatgctcgacctgctcgccgttttcctgagttgccagccaggccatgcgcacttcataggcaataacctgaaccgccatcgccaggttcagcgagctgtattccgggttagccgcaatcgcgacatgataatggcatttctgcaactcttcattggtcaagccgacgcgctcgcgaccaaacaccagcgccaccggggtatttgccgcttcagcgacgcttttcaggccgcattcgcgcgggtcgagcatcggccatggcagcgtgcgggaacgtgcgctggtgcccaccaccaggctacaaccggctaacgcttcgtcgagcgtatcgacgatgtgagcattaccaatcacatcgctggcccctgctgccagggcaatcgcctgggagtcgggtttcaccagtggattaaccagccacagattggttaatcccattgttttcatggcacgggcaacagaacccatattgccggtgtgtgacgtctccaccagcacaattcgaatattttgcagcattgtctttcttcatctaaagattattcacgcatcttatcataaaacgaagacagatgccgatctcgctgctatactctgcgccgttttcccgttctttaacatccagtgagagagaccgatgcatccgatgctgaacatcgccgtgcgcgcagcgcgcaaggcgggtaatttaattgccaaaaactatgaaaccccggacgctgtagaagcgagccagaaaggcagtaacgatttcgtgaccaacgtagataaagctgccgaagcggtgattatcgacacgattcgtaaatcttacccacagcacaccatcatcaccgaagaaagcggtgaacttgaaggtactgatcaggatgttcaatgggttatcgatccactggatggcactaccaactttatcaaacgtctgccgcacttcgcggtatctatcgctgttcgtatcaaaggccgcaccgaagttgctgtggtatacgatcctatgcgtaacgaactgttcaccgccactcgcggtcagggcgcacagctgaacggctaccgactgcgcggcagcaccgctcgcgatctcgacggtactattctggcgaccggcttcccgttcaaagcaaaacagtacgccactacctacatcaacatcgtcggcaaactgttcaacgaatgtgcagacttccgtcgtaccggttctgcggcgctggatctggcttacgtcgctgcgggtcgtgttgacggtttctttgaaatcggtctgcgcccgtgggacttcgccgcaggcgagctgctggttcgtgaagcgggcggcatcgtcagcgacttcaccggtggtcataactacatgctgaccggtaacatcgttgctggtaacccgcgcgttgttaaagccatgctggcgaacatgcgtgacgagttaagcgacgctctgaagcgttaatgactcaggcgggtgatatcactcacccgccctcgcctttcaggcgctattccgaaatacttcctcactgctttactttctttcgtcactctcccaccatctttccccgattaatggatgataaagaagtcgcaaggaaaggttatggcactgccagtgaacaaacgcgttcccaaaattctgtttattctctttgttgttgccttctgcgtttatttagtgccgcgcgttgccatcaacttcttctattatcccgacgataaaatttacggtcccgatccctggtcggcggaatccgtcgaatttacggctaaggacggtactcgtctgcaaggctggtttatcccttcttcgacgggccctgctgacaacgccatcgcaaccatcattcatgctcacggcaatgccggaaatatgtccgcccactggccgctggtcagttggttacccgagcgtaatttcaacgtttttatgtttgattatcgcgggtttggtaaatcaaaaggcacgccgtcccaggccggattgctggacgatacgcaaagtgccatcaatgtggtgcgccatcgcagtgatgtaaacccacaacgtctggtgctgttcgggcagagtattggcggggcgaatattctggatgttattggtcggggtgatcgtgaaggcatacgtgcggtgatcctcgactccacatttgcctcttatgcaaccatcgccaaccaaatgatccccggcagtggctacttacttgatgagagttacagcggcgaaaattatatcgccagcgtcagcccgatcccgcttttactcattcacggtaaagctgatcacgttatcccatggcagcacagcgaaaagttgtatagcctggcaaaagagccaaaacggttgatcctaatcccggatggcgaacacattgatgctttttccgatcgtcacggcgatgtttatcgcgaacagatggtggactttatccttagcgcgttgaatccgcagaactaacccatgatcgctagcacgataatcattcacaaaaccaccttaagacatgctaatccactggtcagaacagtttaagatgagaaaaattctgtgacgcttgccaacatttctgatgattagcattcccttcgccatttccttgagcaaactttagctattcttatcaattatgcttatgggagatctacagatgatgcctacgcttgctccaccatctgtcctttcggctccccagcgccgctgccagatcttgctgacgctctttcagccggggttgaccgccaccatggcaaccttcagcgagcttaatggtgtggatgatgatattgccagtcttgatatcagcgaaacaggacgggagatcctgcgctatcatcaactcacactgacgactggttatgacggtagctaccgggttgaaggtacagtgcttaaccaacgtttgtgtttatttcactggctacgacgtggtttccgtctgtgtccgtcatttattaccagccaattcacccccgccctgaagagtgaactgaagcggcgcggaattgcgcgtaacttttacgacgataccaatctacaagcgttagtgaatctctgctcccgacggctgcaaaaacgctttgaatcgcgcgatattcatttcctgtgtctgtatctgcaatattgtttgctgcagcaccacgctggaattacgcctcagtttaatccgctccaacgtcgctgggcggaatcctgccttgaatttcaggtagcgcaggaaattggacgccactggcagcgtcgggcgctccagcctgtaccacctgatgagccactgtttatggcactacttttttccatgttgcgggttcccgatccattgcgggatgcgcatcagcgggacagacaattgcgtcagtctatcaaacgtctggtaaaccattttcgtgagctgggaaatgttcgtttttatgatgaacaggggttatgtgatcagctttatacccacctcgcccaggcgttaaatcgcagtttgtttgccatcggtattgataataccctgccggaagagttcgccagactgtacccacgcctggtgcgcaccacccgcgcggcgctggccggatttgaaagtgaatacggcgtccatctttctgatgaggaaagtggtctggtcgcggtgattttcggtgcctggctaatgcaggaaaacgatctgcatgaaaaacagattattcttcttaccgggaatgatagcgagcgagaagcgcagattgagcagcagttacgcgaactaacgttactgccgctcaacattaagcatatgtcggtaaaggcatttttgcagacaggcgctccgcgtggcgcggcactgattattgcgccttataccatgccattaccgctcttttcaccaccgctgatctatacggacctgacgctgacaacacatcaacaggagcagatccgcaaaatgctcgaatcagcatgagggaacaactttcgggcgcaaaaacattgccggaagcgccaccagcgccattacccagaacacgccgtggcccagatattgatacaggaaaccggcgaaaacggtcatgatagcgatactgccgcccatcgcgacggcagagtaaaccgcctgtaaacggatgacttcgctaccctggcgagcagcaatataacgcatggcggccaggtggcagaccgtgaaggtgccgcaatgcagaatttgcaccactatcaaccacggcaacgccgtagttgctcccataatgccccagcgcactacgccgcaaatcgccgagatcaacagcatatcgcgtgcactacaacggcggaaaagtttattactcagcgcaaagataatgacttccgccaccacgcccagcgaccacaaataccccaccgccgaggccgagtagccagctgcctgccagtaaatggcgctaaaaccgtaataggccgcatgtgccccctgcaataaacaaacgcaggccagaaagcgccagttctggcgaaccagcgccaaccacgcagaccaaccggtgctctcctgctggcgacttgccccttgtggctgaatcgtcggacggatgagaaagccgagcagcatggatgccacgcccaacgtcaacagcgcgaggatcacccgataatcaaacatagtgaccagtttgcccgtcagcgccgagccaatgacaaacgccaccgagccccacagtcgcactttgccgtaatcaagcgggaactgcttttgccacgtattcgccagtgcatcggtcaacggtaccagtggtgagaaaaagaggttaaagccaatcatcaccagcatcagccacgctacgtgcgcccccgcccagaaggcgacagcaaagagaagtgtcagcagtgccagcacgcgcaaggcggaaatcaggcgggaaggatcgctgacgcggggcgcgatgagcaaactcccgaggaaacgggcaaccagacctgcccccaataacaggccgatggtttctggcgttaaaccaatccctttaagccagacgctccagaaaggtagaaaaatgccgtaactaaaaaagtatgtgaaatagccgagcgccaaccagcgcgtggattgcaaaaccatgagtccctcccgtcaggaggcgttagtctggggttaatcgaatgttggtgcaagttgaaaaataagaatattcgagcctgcttcccgatgtctgtaacgccagttcacaagcactaaaaaactgagatccgcgacgcatgttgcaaaaataatgcgtaattatgccgttacgcttgccaaacgttcctgcacaatggcgatgaaatcgcgtaatgccggcttcatctcccctttcttccacgccatcagtaaagcaatggaaggcacatttccggcaatgggacgaaaaacaacctgtccggtattaaaattattcatataaccgggtatcaaagtgacgcccagccccatgcccaccagattcatggtcaccagaatattcgttgccacctggacgatatttggctggctgttttcttgcgcaaaccacgctttaacgatcggcgcaagcgaaccggaatacaccggatcggtactgacgaaattcacgccatccagttgcgcggcggtgatctctttttcatgtgctaaagggtgatcaaccggtaacacaaccactaatggttcgtcaaaaagctccagataatcaatctccgggctataaacaggatggcgcattaagccgacgtcgagttcaccacggcgaattttttcctcctgttgcgtggtgattaaactcaccagctcaatcaaggtgtctggctgtctgagacgaaacatcggtaatacttttggcagtaaattcacttccgccgatggcacaaagccaatggttaattgtctgtcttcctgaacaattttccgcgcccgtaatttggcattttccgcttgttcgaggattgccagcgcgtcctggagaaaacattctcccgccgccgtcaacgcgactttgcgcttatccctcaccagtaacggaacaccgacacagttttcaagatcgcggatctggctgcttaacgaaggctgtgaggtatgcagtttttccgccgcacgggtaaagttcagtgcctgcgccactgcgacgaaatagcgtaaatgccgtagttccatcaccttccccttgttatcgaaaaaacgtctcagctggtagaaattaactatttcacatattagcaaccaaccagcaacatccttatggcacaaaaatagaaggtcaatacatcttatctttcaggattaaaaaatatgaccacaccctcagatttgaacatttaccaactgattgacacccaaaatggtcgggtcactccgcgtatttataccgacccggatatttaccaactggagcttgagcgtattttcggtcgttgctggctatttctcgcccacgaaagccagatcccaaaacccggtgatttctttaacacctacatgggagaagatgcggttgtcgtagtgcgtcagaaagacggcagcatcaaggcgtttctcaaccaatgccgccaccgggccatgcgtgtgagttatgcagattgcggcaacactcgcgcctttacctgcccgtatcacggctggtcttatggcattaacggcgagttgatcgatgtaccgctggaacctcgcgcctacccacaagggttgtgtaaatcccactggggactaaacgaagttccttgtgtggagagttataaagggctaatttttggcaactgggataccagcgcaccgggcctgcgtgattacctgggtgacattgcctggtatctggatggcatgctggatcgtcgcgaaggcggcaccgaaattgtcggcggcgtacaaaagtgggtgatcaactgtaactggaaattcccggcagagcagttcgccagtgaccagtatcatgctctgttcagccatgcttctgccgttcaggtattaggggcgaaagatgatggcagcgataagcgcctcggtgatggacaaaccgcccgcccggtgtgggaaaccgccaaagatgcgctgcaatttggtcaggacggtcacggtagcggtttcttctttactgaaaaaccggatgctaatgtctgggtcgatggcgcagtttcaagctattaccgcgaaacctatgccgaagcagaacaacgtttaggtgaagttcgcgccctgcgcctggcgggtcataacaatattttccccacgctttcatggctaaacggcactgccacactccgcgtctggcatccgcgcggccctgatcaagttgaagtgtgggcgttctgtattactgacaaagccgcctccgatgaagttaaagccgcttttgaaaacagcgccactcgtgcttttggtcctgctggttttctcgagcaggatgactcggagaactggtgtgaaatccagaaattgcttaaaggccaccgcgcccgcaacagcaaactgtgtctggaaatggggcttggtcaggaaaagcgccgcgacgacggcattcctggcattactaactatatcttttcagaaactgccgctcgtggaatgtaccaacgctgggccgatcttctgagtagcgaaagctggcaggaagtgctcgataaaaccgccgcttaccagcaggaggtgatgaaatgagtgcgcaagtttcactagagttacatcaccgcattagccagtttctctttcacgaagccagcttactggacgactggaaatttcgtgactggctggcgcagctcgacgaagagattcgttacaccatgcgcaccacagttaacgcgcaaacacgcgaccgccgcaaaggcgtccagccaccgacaacctggatttttaatgacaccaaagaccagctggagcggcgaatcgcccgtctggaaacgggcatggcctgggcagaagagccgccgtcacgcacccgtcacttaatcagcaactgccagataagcgaaaccgacatcccaaacgtatttgctgtgcgggtaaattatctgctttatcgggcacaaaaagagcgcgatgaaacattctatgttggaacgcgtttcgacaaagttcgccgtctggaagatgacaactggcgcttgctggaacgggatatcgtcctggatcaagcggtaatcacttcccataacctgagtgtactgttctgatgaatcgaatttatgcgtgtcccgttgcggatgtgccggagggtgaggctctccggatcgatacctcgcccgtcatcgccctgttcaacgttggcggcgagttttatgccattaacgatcgttgcagccatggtaatgcgtcaatgtcagaagggtatctggaagatgacgccacggtggagtgcccgctacacgccgccagtttttgcctgaaaacggggaaagcgttatgcctgcccgccaccgatccgctcaccacttatccagtacacgttgaaggtggtgacattttcatcgacttaccggaggcgcagccatgagcgatctgcataacgagtccatttttattaccggcggcggatcgggattagggctggcgctggtcgagcgatttatcgaagaaggcgcgcaggttgccacgctggaactgtcggcggcaaaagtcgccagtctgcgtcagcgatttggcgaacatattctggcggtggaaggtaacgtgacctgttatgccgattatcaacgcgcggtcgatcagatcctgactcgttccggcaagctggattgttttatcggcaatgcaggcatctgggatcacaatgcctcactggttaatactcccgcagagacgctcgaaaccggcttccacgagctgtttaacgtcaatgttctcggttacctgctgggcgcaaaagcctgcgctccggcgttaatcgccagtgaaggcagcatgattttcacactgtcaaatgccgcctggtatcctggcggcggtggcccgctgtacaccgccagtaaacatgccgcaaccggacttattcgccaactggcttatgaactggcaccgaaagtgcgggtgaatggcgtcggcccgtgtggtatggccagcgacctgcgcggcccacaggcgctcgggcaaagtgaaacctcgataatgcagtctctgacgccggagaaaattgccgccattttaccgctgcaatttttcccgcaaccggcggattttacggggccgtatgtgatgttgacatcgcggcgcaataatcgcgcattaagcggtgtgatgatcaacgctgatgcgggtttagcgattcgcggcattcgccacgtagcggctgggctggatctttaaggaagcacgatgaaagaaaaaacgatcattattgtcggtggcgggcaagcggcggcaatggctgcggcctcgctacgccagcaagggttcaccggtgagctgcatctgttttccgatgagcgacatcttccttatgaacgacctccactctcgaaatccatgttgctggaagattccccgcagttacagcaggtgttacccgctaactggtggcaggaaaacaatgttcatctgcattccggtgtaaccatcaaaacgctgggtcgcgacacacgagagttagtgttaaccaacggcgaaagctggcactgggatcagctttttatagcaaccggcgcggcagctcgaccgctgccgttgcttgatgcactgggagaacgctgctttaccctacgccatgccggtgatgccgccagactgcgagaagttctgcagcccgaacggtcagtcgtgattatcggtgccggaactattggtctggaactggctgccagcgccacgcagcgcagatgtaaggtgacagtgattgaactggcggcaaccgtcatgggccgtaatgcaccaccgcccgtgcaacgctatcttttacagcgccaccagcaggctggtgtgcgcattctgctcaataatgccattgaacatgtggtcgatggtgaaaaagtagaactgacgctgcaaagtggggaaacgcttcaggctgatgtggtgatttacggtattggtatcagcgccaacgagcaactggctcgcgaggccaaccttgatactgccaatggcattgtcattgatgaggcttgccgcacctgcgatcccgcgatctttgccggtggcgatgtggcaatcactcgtcttgataatggtgcactacaccgctgcgaaagctgggaaaacgccaataaccaggcgcaaattgccgctgccgcaatgttagggctaccgctaccgctactgccgccgccgtggttctggagcgatcagtacagtgataacttacagtttattggcgatatgcgtggcgatgactggctttgtcgtggcaacccggaaactcagaaggcgatttggtttaatctgcaaaacggcgtgcttatcggtgcggtcacgctgaatcaggggcgtgagattcgcccaattcgcaaatggatccagagcggcaaaacgtttgatgcgaaactgctgatagatgagaacatcgcgcttaaatcactgtaaccaggataattagcgaatatctcaatgcctggggcgtggcgaggtgcaagagtgtgtattacgtttaaatcacattatcttgcaaagggattggttatgaacacactacgttattttgattttggagctgcccgccccgttttgttattaattgcccgtatcgccgtggtcttaattttcattatttttggttttcccaaaatgatgggctttgacggtacggtccaatatatggcctcgttgggcgcgccaatgccgatgctggcagcgattattgcggtagttatggaagtgcccgccgcgatattaatcgtgcttggctttttcacccgtccgctggcggtgctgtttattttctacacgctgggtacggcggtgattggtcaccattactgggatatgaccggcgatgcggttgggccaaatatgattaatttctggaagaatgtcagtatcgctggcgcgttcttgctattggcaattaccgggccgggggcaatttctctcgatcggcgttaggaaagatgccggatgcggcgtgaacgccttatccggcatttaataaattacagccactctacccgcaacgacatctctgaagttgttgattcccctggtgctagcgcaatgagatcacccccttccgggcgatgatgatcatccggcgcatggctcatcggttccagacagaagaaatcaaacgcatatcctttatcaaacgcagggtcggaaacaaagatgaaataacacggtgcaggtggcgtcgtttccatgatgatggcataaccttcctgcggctgctcgatgcgggcctgaccattccatccggcaaaaccattgttcacccactggcgcggcaacggcgcgggctggttaaaatccagttcctgcggtagctgctcgcaaaactcacccgccagccactgctcccgctccagccagtaaccgctcgcctgtgcctgaatccgcgtttgcggcgacaacggaaaataaggatgccagccggtaccaaatggcagcgtctctgccccttgattggtgacagagagcgtcaccgtcagcgtatccgccgttaaatgaaacgcctgacttacccgatagtgatagacaccgctgcgatgttcatacaccagacacaaactatcatcgctgtgcgagacacattgccactcgcccagccagccatcgccgtgtagatagtgcgcatcccactcaacattcggttgcagttgatactcacgcccctgccagacaaaacgattgccgctcacccggtttgcaaatggcaccagcggaaaacatgaggcatcggttgccacaccgctttttttaccaggacgtaagagcggcgtcgtatcgcgccagaagccttcgattacgccgccctggtcagaaacgtccagctttagcgacccgtgggataaggtatagatggtcatccgctaactccttaatccgggaagttaatcacaactttcccgcatttgccgctcgccatcagcgcataggcatcacctgcctgttccagcgagaagcgatgggtaatggcgttacgcggccacagcttccagtccgtcagatcatgggcgcatttttccatatggaacagactggtcacccaggagccgataatccgccgttgatggtgcatcagatcggcgctgacctcgaattccacttttccggtttcaccaatgtaaaccacccgtccccagtcagcggtggattgcagtgccagcaagcgacctgcggcattaccggaacaatcgagcgcaacatccgcgccaccgtgggtgagttcggcgataatctgcggcagaccttcggtggttgctaaatagccgtgatccatcacccctaactgttttgccatcgccagacgttccggcagcatatcaacgccgatgatccgttttgcaccgcgacctttcgccagcatcatcgccatcatgccgactggccccagaccgaccaccagcacgttatcactgccggaaacttcgccgcgcaaaattccttcatacgctgtaccaacgccgcaactgataaacgcaccatcttcgtagctcagcgcatccggcaggaggatcagatctttttcttccgccagcaagtattcggcatgaccgccgtcacgctgccagccgtaagccgcttttccttcgccagtacaagaaataggaaaaccgcgacggcagttcgggcaaaaaccacagccagaaatgtgatacaccagcacgcggtcgccctctttaaaatggcggcagccttgccccatcgccacaatctgcccgcacggttcatgaccgttgataaagccctggtataacggtttatcgggtgccgccgctgtggcacggtgttgatgatagatatagtggacatcgcttccgcaaatcccggaggatttcattttgatcagtacctggttaatccccggcgtcggcaccgcaacttcccgcagatcgacggtcgaatttcctggtaaataagctgccagcatcgttttcataaatccctcattaacaatacgattaattttcatccctgccgcacccgcgccaggggcgttaaggtttagcgtttcgctttactgcttcgctgggtcagcaagatattcgccagcaccgccaccacgatgatgacgccgcgtaccacctgctggaaaaaggagttaataccgagcagcaccagaccgttaccgattagcgtaatcaccagcacaccaagcaatgtaccgaacagggaaccgcgaccgccggaaagtgccgtaccgccgaccacgaccgcggcgatgacgtcaaactccagaccgtttgcggcacctgcgttaccagaaccgaggcgcgccgccaacaaaatgccggtcaccgccgctaataatcccgaaagggtaaagataagaatgcgcacccgacgaacgttgatgccgcacaactgcgccgccgtagcattaccgccaacggcaaaaaccgagcgcccgaaggcggttttgcggctgatgaacacaaacagcgcaaacaacacaatcatgatcagcgcggataccggcacaccgagaaattgtccgcccagccagtccagcacctcgttttcatcaatcggcactggcagtgcgttcgtcataaacagccccattccgcgcagggcgctccacagccccagtgtggcaacgaaacttggtacattaaacacgccgcgcagcaccccggccagcgttcccatcagcgcgcctaacagcaacaccagcaggcacgccaccgccagcggaacttcaaattgcagcaaaaatgccaggcacaccgagacaaaagccaccatcggcccaacgctgacatcaatttcaccggagataataatcagcgtcatcgcccaggcggcaatcccaatggtggcggcatcgcgcagcacgttcatctggttattcaatgagataaagccaggcgcgttcagggagaagaccagataaagaatggcaatcaccaccagcaaaccgatctcattaatatggcgactgacaaattgtttgagcgagacgctcttgccctgcggcaatggtaatgacgaagcagacatcttcaggttcctcggtaaaattcatcagtgcacagacagaatggcggacatcagctcatccacattgaccggagcgtgaaactcctgcgagaacgtgccgtgctgtaataacaggatgcggtcacacaccagcggcaactcctccacttcactggagataaacaccacgctttttccttcggcagccagctcacggacaatacggtaaatctgctgtttggcttcgatatcgacgccgcgcgttggctcgtcgagcaacaaaatctggctggcagcatagacccaacgaccgatcaccactttttgctgattgccaccagaaagcgtgccgatgggtgtttcgctactggcggccttgaccgtcatccgctgcatcacctcttcggtcaggcggcggatggtggaccattgcagcacaccgttggcgctgattttttgccgattggtcagcactgtattttcgtcaacgcccaaccagggaatgatccccgcttctttgcggttttctggcgtatagccaatgccgcgtttcagcatgtcgccgtaatcggggcgcgtgattttctcgccgttgataacaatttcgccctgttcatactcctccagcccaacaatcgccttcagcaattcactgcgccctgcccccagcagaccagcaatgccgagcacttcgccacgacgtagcgtaaaactgatatcctccagcttgggcttatggcgtaacgcacggacttccagcacggcctgatccacaatttcctgaggggctaccggcgcaatatcaacgtgatcgcgcccgagcatcagcgacacaatatgatgcgtggaggtgttttcgagcatcacatcgcccgccacctgaccatcgcgcataacggtggcacaggaggcaatgcggcgaatttcttccatccggtggctgacataaatcaccgccacgcccagtgccgacatctttttcaccgcgctgatcaccagttcaacttccgcactcgcaagcgaactggtaggttcatcaagaatgaccacgcgcggctcgcccttcatcacccgcgcaatttccaccagctgcttttgcgccgggcttagcgttgaaacaagttgttcaggactaacgtcaacgcccagcgcctgtaagcaacgttgggcatcctgcgccatttgcaggtaatcaatcatgccgttgcggcggggccactgaccgaggcagaggttttccgccactgtcagcccttccaccagacttaactcctgataaaccgcgcgcacccccagttcagcggcacggcgagtcagcgtagcttcgtcaccttccagtcgcgtctcgccaatccagatatcaccgctatccgggcgttcgctgccggtaagcattcgaatgagagtcgatttgcccgcgccgtttttacctaacagcgcacgaacttcgcctttattgagcgtgaagttaacgttatccagcgcaacgacgccgggataacgcttatttcctgccaccacttttgctaccgggactgcctctgttgccgtgaacatagggacctctgcgaatcagcgattagggcagaccatcaacgtgcgttgccagccactgtttaccgtcttccgttttggtatagagatcgataggcacctgaatcactttttcaccgtcggcttgtttattgataaccttcaatgtttgcgcgaaaacagcattgcccattttcttaccggaaatatccactaccgctttcagcacctgattgttttccagctcctgagcaatttcggttgtcatatccgaaccgaaaacagcaatttttccggcctgattttgattacgtaccgcttttaccgcgccgagtgtcgcaccgcccgattcccccataatggcgttgagatccggcgtggagataattagtttttcaccaacggaaatcgctttatctaaaacagtcccttcctgattagcgacaatttgcgcgccgggaacgcgggattttaaaacttcttcaaatcctttacgtcgctgcacacaaacttcaaaggcttcgcaattgatgacggcaattttcggctggtcaattttattggcaataaaataatcagcggcagcgttacccagttttttaccaaattccagcggatcgccgaccagatacgccgagacatatttatcgacccccttttgattaatacaggtgttgtagcaaatcaccggaatgcccgcttcactggcgcgacgaacggtacggctactgccattttcagacactgccgataaaataatggcatcgacattacgcgccacgagggtatcaacaaaggtactttctttcgaaatatcaccctgggcgttagtttctattaactgaacttgtactgaggaatcttttgccgcatcctgaacgccctgacgcactccagcgtagtatccctgagtatcaaggtatattgcgccaatggtcatttctttttccgcagccctggcaaatagtgcgctacctaatagcgtagccattaataatagattacgggttgttctcatttttgtaggcatagagcctcctgtagggtttttattaacaacggcttattctaattattttgtgatgagcggcagcgcgtgccgctcaaatattacagttaatagggtttagtgaacgcggttaaaaataaaaggcatcacggtggtgaataatgccgctttcggccaagccggattaatcgccgtcaattcagcgcgagcagactcatattgcgcaacctccccgagtcccgcggacgccagcatcgccaccatcaggcatttttctttatgctgctgttgtaaatcgccatacagcgacaacaagtcaggttgcgagacggcaaagaaatccgcttcgatactggttttcgccatctcttgcgcccactgtttcatttcactaaacagttgctgtgcggtttgttgttcgcccagcagtcgcagcgccatcccttgccagaagagataatcaaccggctgatcgttgtaataactgtgaatgttaatagtgcgatcgccggtcgccgccagacgtaaacaacgcgtcgcttcagtttcatcgccctgcgcgttggcgcatatcgcctgccagaaccagatgtcgttatcagtttgccccggtaaacggccttcgcttaaattctccggataatgcagcgcggcatgaagcagttcgcaggcctgctgcggctgtctggcatcaagatgctgccaggcgcgtaataactggttgaggataaactgactggtgaccttcccttccccgccttcccacgggtggaatttgcgcgtggcgagaatgtccgccgctttgtctgcctgacccgtgagatgccacaaattgagcagttctgcggtcatgtcgtcgcgtttcagcgcaatttccagattattttccagacgcgccagtcgtttctccggtgtggctccacttaacttatccagcaaatcccgttcgaaaagcagacgtgcatcctgcggcgcaagctgataagcattatcaagataacgcgcggccagctcataatcgtgttgcttattccacgcatggatcgctaacccgcgccagccgtcggcaaactccggcgacatctctacgcaacgttgccaaaaggcaatggctttgttgtagctacgtttgttgtagtagaagcaagctagtaaatggcgagcaaaccagcactcttcaatactctccagcgccgccacttcttccagcgtattcgggaaacggacaaactgcgggaagacatcaatggcttttgcgaccagttcgccacgttcggctttcggcagcaagctggcttgcaggtaaagcggcagcgtgcgctggcagtccagtgcgttcagcatctctgccgccagggtgggcattccccagttaatcagttgcccggcggtcatcagggcgttaacgtcgcgtccctgacacagaccgcgccactgcgcgagagctgattcgctacgaccatcgaaccagttcagccaccacagagtggcgttcagcggataatcgcgcagcagtttctcgcgctgcacacgcgcgttgtcctgacgaccacttaacaccagcagcagattatgcaggcaaagcacttcctgattggttgggcaggcgcgaagactttgttggcaaaaatccagaccagcgtcgaagttaccattacgcgccgccagtcgtgccaggccataatagccaccggctttgctgttgccgctccagaccgcacgccagaaatcctcttcggcttgttgatattgtccctgacgttcgtaagcactggcgcgaatcaaactcgcctgtccgcactgcggatttttgttcagcgcatgtgcgcgtttcagagcctgagtggcatacgccaccgcttgcgggaaatctgcgcggttatattccagcatcgccagcgccaggttacagcgataatccagcgggtccagcgccacgccgcgcaggtagtaatcgaacggtgaacggctggcgtgatgatattgctccagatgctgaccgataaaccaggcttcatctgtactggtaatgtcttgtgctgccagtggcgctttggcgacgtccggtaacggcaacgcttgcggctgatgttcctgataactcagtacaatattgccgtcggcatcggagagctcaatggtcagcctttcaggattgataccgtgcaacacgccctggatggcggtcgcaggcatcagtgccacggcatcatcaagtaacgcgttgcatttaccgatttcgcggatcgccaggcggtatccgttcaacggagagatggcatacagcccccactcaatcccccgcttactacgctggagttttatcaccgcatcgcgggaggcattttgcaccatgcccaaagaatgataaggcaggaaatactgctcaaaacgcttctcttcgtaagcatcaagccaggtaaaatcgggctggttatcggcaaaaataccggtcatcagttcgatatacgggccgttattgtcggtcagactcttatcccacgcctggccaaattcactgtgtccccaactccactgttttttacctggcgcaatatggtggttggcaacgtgcagcaaaccgccatcttcatcgtgacaccacgcgccgacaaaatcgtactgcgatttttcggccatatatgaggttggaacaggcacatttttatagcgagaaatgtccactccagcggagtagtccactttgtagtaagtgccggtagcgatggggaaagcggagacggcccgtttgccgtgatcaaacaccgccgttacatccggcgggaagacgctctgatgcccttccccccctttcactgccgggttggcccaccacaagaaatgacgcggcgtggcgttcccgttatagacgcggctggcgatttccagcgccgcccggtcagggcgcagggtgaaacctgtcatcacctgtaaaccatgcatcggctccgtttcgcctacccacaccgtctgtgcaccgtcttcatgggcttcgagggtgaaatcaacgggcataaaggtggtcgggcgatgatgttgcggccagttaaactcaatcccaccggaaatccacggccccagcagccccaccagcgcaggtttaatgacttcattgtgataaacaaaatcgcgctgtttcactttatcccacgcgcgatgcacccgaccgcccagttccggcaggatcatcactttgatgtagtcgttttccagccacaccgcctgccaggatttcagggttttctgctcgctcagcgtatcggtcacgccgtagggataaaccgcgccggacgatccctgataaacgcgattttccaggaacatgggatgtatatcctgcggcccggtttcataggtcgggatctcaacgcgctcttgccacacttttactggagtcatggtgccctcaatattaacaagacatactgaattaaaagatttgtggcagtgtattgaacaatctggcaatgttttcgcggaataatcacgcaattaactaaacaaggtttagtgaagatgagagcctgcattaataatcaacagattcgccaccataacaaatgcgtgattctggaactgctgtaccggcaaaagcgcgccaataaatcaacgctggcccggctggcgcaaatttcgattccggcagtcagtaatattttgcaggaactggaaagcgaaaaacgggtggtgaatattgacgatgaaagccagacgcgcgggcatagtagcggtacatggctgattgcgccggaaggtgactggacgctgtgcctgaacgtgacgcccaccagtattgagtgtcaggttgctaatgcttgtttaagtccgaaaggtgaatttgagtatttacagattgatgcaccgacgccgcaggcgctgctgtccgaaatcgaaaaatgctggcatcgccaccgtaaattgtggccggaccataccatcaacctggcgttggcaatccacggtcaggttgatcctgtgaccggcgtgtcgcaaaccatgccgcaagcgccgtggacaacgccggtggaggtgaaatatctgctggaagagaagctcggcattcgggtgatggtcgataatgactgcgtgatgctggcgctggcggagaaatggcaaaataattcgcaggaacgggatttctgcgtgatcaacgttgattacggcattggctcgtcgttcgtgattaacgagcaaatttatcgcggcagtttgtatggtagcggacagattggtcacaccatcgttaatccggatggcgtcgtctgcgactgtggacgttatggctgcctggaaactgtcgcctcgttaagcgcattaaaaaaacaggcgcgggtatggctaaaatcacaaccggttagtactcaacttgatcctgaaaaactgactacagcgcagttaatcgctgcctggcaaagtggagaaccgtggatcaccagctgggttgatcgctctgccaatgccattggtttgagtctgtataacttcctcaacatcctcaatattaatcagatttggttgtacggtcgcagttgtgcctttggtgagaactggcttaatactattattcgccagacaggatttaacccgttcgaccgcgacgaaggaccgagcgtgaaagcgacgcaaattggctttgggcaattaagccgcgcacaacaggtgctgggaattggctatttgtatgttgaggcgcagttacgacagatttgatggcgcgataacgtagaaaggcttcccgaaggaagccttgatgatcataaacgaaaaattgcctgatgcgctacgcttatcaggcctacacggagattgcaatatattgaatttgcaaagttttgtaggccggataaggcgttcacgccgcatccggcatgaacaacgagcacattgacagcaaatcaccgtttcgcttatgcgtaaaccgggtaacgtgcgcagatgtcgagaactttacctttgatgcgctcgataacggcttcatcattgatgctgtccagcacgtcacacatccagccagccagttctttcgcttcggcttctttaaagccgcgacgggtaatcgccggagtacctacacgaataccggaggtcacaaacgggctcttcggatcgttcggtacgctgtttttgttgacggtgatgttagcacggcccagagcggcgtctgcttctttaccggtcaggtttttatcaaccagatcaaccaggaacaggtggttatcagtgccgccggaaaccactttgtagccgcgctcgaggaacacttctaccatcgctttagcgtttttagcgacctgctgctggtaagttttgaactcaggctccatcgcttctttcagagcaaccgctttaccggcgattacgtgcatcaacggaccgccctgaccaccagggaaaacggcagagttcagttttttgtacagctcttcgctaccacctttcgccaggatcaggccgccgcgcggacccgccagggttttgtgagtggtggtagtaacaacgtgagcatgaggaaccgggttcgggtagacgccagcagcaaccaggcccgcaacgtgcgccatatcaacgaacaggtaagcaccgatgctgtcagcgatttcacgcattttcgcccagtccaccacgccggaatatgcagagaaaccaccgataatcattttcggcttgtgttctttggcttgtttttccagatcggcgtagtcgatatgaccggtagcatcgataccgtaaggaacgatgttgtacagtttaccggagaagttaaccggagaaccgtgagtcaggtgaccgccatgcgccaggttcatacccagaacggtatcacctggttccagcagcgcggtgtagaccgcaaagttagcctgggagccggagtgcggctggacgttagcgtagtcagcgccgaacagttctttcgcacgatcgatcgccagttgttcaacgatatcaacatactcgcaaccgccgtagtagcgtttgcccggataaccttcagcatatttgttggtcagctgagaaccctgcgcctgcattacgcgcgggctggtgtagttttcggaggcgatcagttcgatgtgctcttcctgacgtactttttcctgctccatagcctgccacagttcggcatcataatcggcaatgttcatttcacgctttaacatccgcatctcctgactcagctaacaataaaatttttggcctttataggcggtcctgttggacaacggcgaacagtataaccgaatcattgtgcgataacaggtcttgacaaaggaatttacgcaaacgattaccttcaggctacgcaaggctttggagaataaagagcttgcaaccggaaacggatttcttttcaggtttgtgatgcaaatttttcacttcatcacattctttctgaaaaacaccaaagaaccatttacattgcagggctattttttataagatgcatttgagatacatcaattaagatgcaaaaaaaggaagaccatatgcttgacgctcaaaccatcgctacagtaaaagccaccatccctttactggtggaaacggggccaaagttaaccgcccatttctacgaccgtatgtttactcataacccagaactcaaagaaatttttaacatgagtaaccagcgtaatggcgatcaacgtgaagccctgtttaacgctattgccgcctacgccagtaatattgaaaacctgcctgcgctgctgccagcggtagaaaaaatcgcgcagaagcacaccagcttccagatcaaaccggaacagtacaacatcgtcggtgaacacctgttggcaacgctggacgaaatgttcagcccggggcaggaagtgctggacgcgtggggtaaagcctatggtgtactggctaatgtatttatcaatcgcgaggcggaaatctataacgaaaacgccagcaaagccggtggttgggaaggtactcgcgatttccgcattgtggctaaaacaccgcgcagcgcgcttatcaccagcttcgaactggagccggtcgacggtggcgcagtggcagaataccgtccggggcaatatctcggcgtctggctgaagccggaaggtttcccacatcaggaaattcgtcagtactctttgactcgcaaaccggatggcaaaggctatcgtattgcggtgaaacgcgaagagggtgggcaggtatccaactggttgcacaatcacgccaatgttggcgatgtcgtgaaactggtcgctccggcaggtgatttctttatggctgtcgcagatgacacaccagtgacgttaatctctgccggtgttggtcaaacgccaatgctggcaatgctcgacacgctggcaaaagcaggccacacagcacaagtgaactggttccatgcggcagaaaatggcgatgttcacgcctttgccgatgaagttaaggaactggggcagtcactgccgcgctttaccgcgcacacctggtatcgtcagccgagcgaagccgatcgcgctaaaggtcagtttgatagcgaaggtctgatggatttgagcaaactggaaggtgcgttcagcgatccgacaatgcagttctatctctgcggcccggttggcttcatgcagtttaccgcgaaacagttagtggatctgggcgtgaagcaggaaaacattcattacgaatgctttggcccgcataaggtgctgtaatttgatgttgccggatggaaacatccggcaacccttgacgcggtttaaattgccgcgtcgtcctcttcaccggtacggatgcgaatgacccgtgccacgtcaaagacgaagattttaccgtcaccgattttgccggtttgcgccgtgcgaataatggtatcgacacaggtatcgacaatgtcgtccggtacgacaatctcaattttcactttcggcagaaaatccaccatatactccgcgccgcggtacagctcggtatggcctttctggcgaccaaagcctttcacttcggtcaccgtcatgccggtaataccgacttcggccagtgcttcgcggacatcgtccagcttgaagggttttataatcgcatcaatctttttcatgctattccttgaaaaggtcgcctgtcttttgatctgctaaacgtaacacataacgccaattcattccttgaaatcgtttgcatccagctcgtgtcgggaaagcagtttataaaattctgtccggttgcgccccgccattctcgccgcgtgggtgacgttgcctttggtgatttgcagcagcttacgcaaatagttgagttcaaactgattacgtgcctcaacaaaggttggcagcgccgtattttcaccctccagcgcctgctccaccagcgcatcactaatcaccggagatgaggtcagcgccacgcactgttcaatcacgttgaccaactggcgcacattacccggccagctcgcggtcatcaggcgtttcatcgcatcggtagagaacgcgcggacaaacggtttatgtcgctctgccgcctggcgcaacaggtgatttgccagtagcggaatgtcttctgtgcgctccgccagtgccggaattttcaggctgacaacgttgaggcggtaatagagatcttcgcggaattccccgcgcgccatcgcttttggcagatcacggtgagtggcagaaataatccgcacattgatatcaatatcgcggttactgcccagcgggcgcactttacgctcctgcaacacgcgcagcagtttgacctgtaacggcgcaggcatatcgccaatttcatcgagaaatagcgttccgccttccgccgcctggaataaaccttcgcgattgctgacagcgccagtaaacgcgccacgcgcatgaccaaacagctccgactccagcaattgctcgggcaatgcgccacagttaatagcaataaatggtttgctgttgcgcgggctggcgttgtggatagcctgggcgaaaatctctttcccggtgccgctctgaccgttaatcaaaacgctgacgtctgattgcgccaccagccgcgcctgttccagcaaacgcagcatcagcgggctgcgggtgacaattgcctcgcgccagcgttcatcggtggctggcgcggattgctccagcgcatcgtcaattgcctgatatagcgcgtctttgtcgacaggcttggtgaggaaactaaaaacgccctgctgtgttgcagcaacggcatcgggaatagaaccatgcgcggtaagaataattaccggcattcccggctgcactttctggatttcagcaaacagctgcataccgtccatttcatccatccgcaggtcgctgatgactaaatctactttttcgcgattcagtacccgtaatccttcagcgccactttccgccgtgaccacactgtagccttcgctggtcaggcgcaggccaagcagtttcagcaatcccggatcgtcatcgaccaataataaatgcgcaggtttatggctcatcaggagtgacctcatgggtggatggcgcgggcttttcactctcgtgcggcgtatccggcgagaaatttccagccggtttgcgggtcgagagctggcgttcaatatcggtcaggttttccagcttgcgggtggtgagttccagttgctgctgtagaacgtgatgttgctggcgcaatgtatccagctcgctgtcgctggactgctggagtttactgtaacgttggcgctcttccgccagttgcagttgcagcgcctgaccatcgcgccagagttgatacagtgggcgaacctgtgccgggatctcggtacttaacgcttcaatacgcgcgaccagctggcggcgctcatacggcgtaattttggcgtcggcgagcaaaatcccttgtttaaaggtattttgccagctgccgtcgtcatattggcgagcttgctgacgcgactgcgcaggcattaaacgatcagcacaatccatcgcccgcagccagtaaagcggattggtttcggttgatttaccttgcagcgcccagatgtcgctacattcagtagaaagatagtcagccagttgataaaccggaattttttcttctgctggcgtatcaatggctggcttattgtgattctgcacgcaacccagcaatgccagacatggcagccctgccagccacagccgtcggggcaataatcgttgaaaaatgtgtcgcatattcaccagacttaaagcctatcccagtgggcgtaattgttgcagacagtctggacatggacagcgcggagaaaccggagcgtacatatcgtacgtgaagatttcgagcactgcccggggccgaactgacaaataaaatagcctgataggataggctgttagcattatttcgtgtttttcgacgacggtaattcaatgcggaaacaaacgtcttgcccgctctcgtcgaccagatacagttccccttgcatacggcgaatacaatccctggcaatgcttaatcccagaccgctgcccttcaccgccccttttcgctggtggcttccctgaaaaaagggttcgaagatcatggcgcgttcctcttgcggaatgggcgtgcctgtattgatgacatcaatataaacccgcgcaccatgtaaactgctgcgaaggcaaatgttaccggattcagccccgtagtgcaccgcattggagtaaagattatccagtacgctcatcagcagcattggctccgccaggcaagctgttgctttgagatcgacgtcggtatgcatcattttagcccgtgcgggcaggctatgagcagaaaccactgtctccaccagcggtgctaactcaacattctccagttccaccgcactgtccgcctgtttacggttgtaatcaagcagttgttcgatcagtttttgcaaattgcggctgctgctatcaagaatgctcaccacctctttttgctctggcgtaagcggcccgacaacctggtcagccagtaattcagtgccctcgcgcatactcgccagtggcgtttttaattcatgagataaatgtcttaaaaattgatggcgttgggattccagccatgacaggcgctcacttaaccaaagaatacgttgcccaaccgagcgtaactcgctcggtccactgaacgagacgctattgcccagagaacgcccttcccccagacggttgatcatgcgctcgatatttttcaccggcccgataatcatccgcgtgaaaagcagtaccattaccagactcaccagaaatagcaccagcgattgccaaccaaaatattgcccacgttcggcgatttcacgctgaagctgctgcccacgagagaacaccactgtgcgcgtggcctgtaccatttcggtattggcactggcaaaggcttcaagacgtgcggcggcggcagcatcgggaccgctgttgttacactgaagttgagccagattgtgcaaatcctgacgtaatgcctggtagagtttatcgtccggcagcacgcctgcgtgggcatcgagcatttcgctgtaacgcttgcgctggctttgataaaccttcgccagggttgggtcgtccagcacgcaatactgacggtaactacgctccatctccagcgccgcgttggtcatcgcttcactgcgccgggcatcaataagcgtagtgcggttaaccagcgccgcctgatcgctaagcgcattcaggctttgccaggcttgccatgccagcaccaacaggggcagcagaatcagcaaaaatgccagcattaccagttgtcgtaatgagcggggaaaaacgggccagcgtttcaaggtgttactctcgtcagacgcgaatagcctgatgctaaccgaggggaagttcagatacaacaaagccgggaattacccggctttgttatggaataaggcggtgcctaactcgacgtttcgcccgatggttgatatagctacgctgatatcagaagttggacggcaggcaccttgttgtgcgtcattcgtattttatgtagcacgtcccgaaggggctgacataagtcggtgaatgagccactggttactattatgcagtaactgtgccaataaagaaaatagtttggtaacgtactgattatacgttgctttgaggggtttatgtctcctccgctgtttgaatgtaaatcagccactgtgtcgctaaaaagagacaacttaagataaacttattagataatattaaaatcaatgagttaagtgtcgccagaaagcgacacggcaaaccacccattgtcgtgatttacagacacaaaaaagctcccggagttgggagcttatgatagtggttggtgcttaatgccgcatccgggctgcaaaaccaatgggctgacgacttaccccaactgcttacgcgcattgcggaaaatgcgcatccatgggccatcctcgccccagttttccggatgccaggagttgctgacagtacggaaaacacgttccgggtgcggcatcataatggtgactcgaccactttcagtcgtgactgccgtaataccgttcggtgaaccgttcgggttagccgggtaggtttcagtgactttgccgaagttatcgacatagcgcagtgccaccagccctttgctttccagtgccgccagatgcgccgcatcacgcacttccacgcgcccttcaccatgagagacagcaatcggcatttgcgagcccaccatcccctgcaacagcagagacgggctttgggttacttcaaccaggctgaaacgcgcttcaaagcgatcggaggtattgcgcacaaaacgtggccacaactcactacctgggatcagttcacgcagattagacatcatctggcaaccgttacatacccccagcgccagcgtttgcggacggtggaagaaggttgcaaactcatcgcgtacacggtcattgaacaggattgacttcgcccaaccttcaccggcacccagcacatcaccgtaggagaaaccaccgcacgcgaccagggcgtggaaatcttccaggcccgtgcgtccggtcagcaggtcactcatatgcacgtcgatagcatcaaagcctgcacggtggaaagctgccgccatttcaacatgcgagttcacgccctgctcacgcagtacggcaactttcggacgtgcgccagtggcaatatacggtgctgccacatcttcgttgatatcgaacgacagttttacattcaggcccggatcggcgtcgttagatttcgcctgatgctcctgatcggcacactccgggttgtcacgcaggcgctgcatctgccaggtagtttctgcccaccagacacgcaacgtggtgcggctttcgctgaatacagtctgcccgttggcggtaatcacaaaacggtcaccggaaaccgcctgccctacataatggacacaatcagcaagcccatgctgtgccagtacggactcgaccgcttcacggtcagcggcacgaacctgaatcaccgcacccagttcttcgttaaacaacgccgccaggcgatcgtcacccagagtggcgatatccgcgtcaatgccacaatgaccagcaaaggccatttccgccagcgttaccagcaggccgccatcagagcggtcgtgatacgccagcagcttacgctgtgcaaccagcgcctgaatcgcgtcatagaagcctttcagttgcgcgacatcgcgtacatctgccggtttgtcgccaagctgacgataaacctgcgccagcgccgttgcgcccagcgcgttattgcctttgcccaaatcaatcagcagcagtgcgttatcttcggtagaaagctgcggcgtgatggtgtgacgtacatcttccacgcgggcaaatgcagaaatcaccagcgacagcggcgacgtcatttcgcgctcttcgttaccttcctgccagcgggttttcatcgacatggagtctttacccaccgggatcgtcaggcccagcgccggacaaagctcttcgcccacggctttaacggcttcatacaggcccgcatcttcaccagggtggcctgccgccgccatccagttggcggaaagtttgatgcgtttgatatcgccaatttgtgttgcggcgatgttggttaacgcttcaccgaccgccagacgggcagaggcggcgaaatccagcagcgcaaccggcgcacgctcgccaatcgccatcgcttcaccgtagtagctgtcgaggctggcggtagtgaccgcgcagttagcgaccggcacctgccacggccccaccatctgatcgcgcgctaccatgccggttacgctgcggtcgccaatggtcaccaggaaggttttttccgccacagtcggcagatgcagcacacgtttcaccgcgtctgcaatggtgatcccttcacgggccagcgcgtcgcctttcgctttcagcgtttgtacatcgcgggtcatcttcggcgttttaccaagcaggacgtccagcggcagatcgatcggctgattatcaaaatgacgatcgtgcagagaaagatgcagttcttcggtcgcttcaccaatcaccgcgtagggtgcgcgctcacgcttacacagttcgtcaaacagcggtaattgatcggcagcaaccgccagcacgtagcgttcctgggattcgttacaccagatttccagcgggctcatgcccggttcgtcgcttagaatctcgcgcagttcaaatttaccgccgcgcccgccgtcgctcaccagttccggcatggcgttagaaagaccgccagcgccaacgtcgtggataaacaggattgggttggcatcaccaagctgccagcaacggtcgatcacttcctggcagcgacgctccatctccgggttgtcgcgctgtacggaagcaaagtcgaggtcggcatcagactgaccagacgccatagaagacgctgcaccaccgccaagaccgatgttcattgccgggccgccgagaacgaccagcttcgcaccgacgttgatctcgcctttttgtacgtgatcggcgcgaatgttgccgatcccgcccgccagcatgatcggtttgtgataaccgcgcagctcttcgccgttgtggctgttcactttttcttcataagtacggaagtagccgttcagtgccggacgaccaaattcgttgttaaacgccgcgccgcccagcgggccttcggtcatgatgtccagcgcggtgacaatgcgctcaggcttaccgaaatcttcttcccacggctgttcgaagccaggaattcgcaggttggaaacggagaaaccaaccagacccgctttcggctttgcgccgcgcccggtggcaccttcatcgcggatttcaccgccggaaccggtcgccgcgcccggccacggagaaatcgccgtcgggtggttgtgagtttcgactttcatcagaatatgcgccggttcctgatggaaatcgtagcggcccgtttcgtggtcagcaaagtagcggcccacttcagaaccttccattacggcggcgttatctttataagcagagagaacgtgatctggcgtggtttcgaaagtatttttgatcatcttgaacagcgatttcggctgctgttcaccatcgataacccagtcggcgttaaaaattttgtggcggcagtgctcggagttcgcctgggcaaacatatacagttcgatgtcgttcgggttacgaccaagctttgtgaaagcatcctgcagatagtcaatttcatcttccgccagagccaagccaagacgcaggttagcgtcgatcagcgcctgacggccctgccccagcaaatcaacgctggtaaccggagtcggttgatggtgggcaaacaactgctctgcatcatctaaagcaaaaaagaccgtttccatcatgcggtcgtgcagttcagcggtaacctgctgccattgttcattggtcagcgtaccggcttctatatagtaagcaacgccgcgctcaaggcggtttacctgttgtagcccgcagttatgggcaatatcggtcgctttcgaagaccagggagagatggtgccaggacgcggggtcaccagcaggagtttgccttgcggggcgtggctggcgagtgccgggccatatttcagcaggcgttcaagttgtgcgtgctcatcatcgtttaacggcgcattgaggtcagcaaaatggacatactcggcgtaaatattgtgaaccgggagcctggcagcctgaaaacgtgccagcagtttgttgattcggaatgccgacagtgcaggcgaaccacgcagaatttccatcataagtctctcgtcttctaagctttcggtgtacccaagggggggaaacgggcgtcattataaagaatctgatgcgctgacgaaaccgtttgcgtggaaataaaatcaccatcgtgaattagcaacgcgtgccgccaatggctgtaataagttgccatctggcgcaggtttacgcaaaatgccgctcatttatgagtaaacctttcactattattacgttttttcaagctgggacgcgcacgacacagagaattaactaattgaaaaaattaaagattaattatctgttcatcggcattctggcactgctgctcgcggtcgctctctggccatccattccctggtttggtaaagccgacaaccgtatcgccgccattcaagcgcggggagagttgcgtgtgagcaccattcatactcccctgacttataacgaaatcaacgggaaaccttttggcctggattacgaactggcgaaacagtttgccgattacctcggcgtaaaactgaaagtgaccgtgcggcagaatatcagccagctgtttgacgaccttgataatggtaacgccgacctgctggcggcaggacttgtctataacagtgagcgggtaaaaaattatcagcctggccctacctattattccgtgtcacaacaactggtttataaagtgggtcagtatcgcccacgtacgctgggcaacctgacggcggagcaactcaccgttgcaccgggtcatgtggtggttaacgatctccagaccctgaaagaaacaaaattcccggaattaagctggaaggtagacgacaaaaaaggctctgcggaattaatggaagatgtcatcgaaggaaaactcgattacaccattgctgattctgtcgccatcagcctgtttcagcgcgttcacccggagctcgccgtagcgctcgatatcaccgatgaacaaccggtgacttggtttagcccgttagatggcgataataccctttccgccgccctgctcgacttcttcaacgaaatgaatgaagacggtacgctggcacgcattgaagagaaatacctggggcatggcgatgattttgattacgtcgatacgcgcacatttttacgcgccgtcgatgcggtactgccgcagttaaagcccctgtttgagaaatacgccgaagaaattgactggcgtttgctggccgctattgcttatcaggaatcgcactgggatgcacaggccacttcaccgacgggtgtgcgcggcatgatgatgttaaccaaaaataccgcgcaaagcctcggcattacggatcgtaccgatgccgaacagagcatcagcggtggcgtgcgttatttgcaggatatgatgagtaaagtgccggaaagtgtgccggagaacgagcggatctggtttgccctcgctgcgtacaatatgggctatgcgcatatgctggatgcccgcgccctgacggcaaaaaccaaagggaatcctgacagttgggctgacgtaaaacagcgtctgcctttacttagccagaaaccctattacagcaagctgacttacggctacgctcgtggacatgaagcctacgcttatgtcgaaaatattcgtaagtatcagattagcctggtgggttatctgcaagagaaagagaagcaggctacagaagcggcgatgcaactggcgcaggattatccggcggtatcgcctacggagttgggcaaagagaaatttccttttctctcgtttctttcccagtcgtcatcaaactatttgacccattctccctctctgctgttttccaggaaagggagtgaagagaaacaaaattaatccgtcgaggattgcgcttttttctgcgctttaatttcctggcggcgcatgcgaaagaagtcactgagcaacgccgcgcactcatccgccagtattccttccgtaatttccactcggtgattcatacccggatgatgcagcacatccattaaagatcccgcagcgccagttttcgcgtcacgcgcaccaaagaccacgcgaccaatgcgactgtggatcatcgctccggcacacattacacatggttcaagcgtgacatacaacgtggcgtcgatcagacgataattttgcatcaccagaccaccctgccgcagggccatgatttctgcatgtgcggtgggatcatggcgaccaatcgggcggttccagccttcgccgattacccgattgttatgcactaataccgcgccgaccggcacttcccgctcatcccaggcacgtttcgccagcgtcagcgcgtgacgcatccagtattcgtggctaaattcgacttcagacaaaaagaaaactccggttataaaagcgcggcgcattatacacggacgctatgctttactctattccagttgctggagttcaccgcgcggggttactcgccaacgatgctgacagaaataaagcagcggattgtcctgattactgtcgctatagccactgtacagccgcagcggagtgccgattttgcgctccagttgtgcgaccttttcatgtcccagacaacgcatcgtcaatacccaaccaccatagccacgctgaatttggctggcgataagattaacccgcggcagccagggcgtatcgaaataaaccgcttcaaccagcggctgcggagagccggtaatcaaccagatatcagcatcggaacttaacaggtaggtggttaatcgctcctgaaccagcggaaaggcggtaacattgtcgcgaaaccagcgcacgaaatcggcctgcaacgtctgtaaacgtgcttcgctgtgaccaaaagtgcacccccacagaagcagactcatcggccagcgtgccgcacgaccttttatcaataacgcaatggctataatcggtaacaacggcaggacaagtaacgcattcagcggttggcgacgtagtaaatagcgcagaaaactgccgaacatatcctgctgatgcaatgttccatctaagtcaaaaaacaccacacgacgctcgtgagttgccaaaccatactcctctggactgaaacatcctgattaattttcgctactacatagcctaacagatagatcatcacttttccggcaacaatcgaccgcatcatggctaactggaatttttaattcatggcaattagcggcaatggaatataaaattcactcgcgtgtgtctcatattgcctgttgtcgccactatttcatcgcgaggaaagatatgaacggcttacttcgtatccgtcagcgttaccaggggcttgcccagagtgataaaaaactggcggattatctgctgctacaacctgatacggcgcgccatttaagctctcagcaactggccaacgaagccggagtcagtcagtccagcgtcgtgaagttcgcgcaaaaactcggctataaaggttttccggcgcttaagttggcgttgagtgaagcgctggcaagccagccggaatcaccctccgtgcccattcataaccaaatccgcggtgatgatccgttacggctggtcggcgaaaaactgattaaagaaaatactgccgctatgtacgcaacgctaaacgttaatagtgaagagaaactgcatgaatgcgtaacaatgttgcgctctgcgcggcggataattctgaccggtattggcgcttcgggtctggtggcgcaaaactttgcctggaagctgatgaagattggcttcaatgctgccgcagtgcgcgatatgcatgcgctactcgcaacagtacaggcgtcgtcccctgacgatctgttattagccatttcctacaccggtgtacgacgcgagttaaacctggcggcagatgagatgctgcgagtgggcggaaaagtgctggcgattaccggctttactccgaatgccctgcaacagcgtgcttctcattgcctgtataccattgccgaagaacaagcgacaaacagtgcttcaatctctgcttgtcacgctcagggaatgttaacggatttgctgttcattgcgctgattcagcaggatctggaactggcaccagaacgtattcgtcatagtgaagcgctggtgaaaaaactggtctgagtaaagaatgcgcgtataatgcccgcccggtttgtgttgttttgagagtttccttatggcgttgttaatcactaaaaaatgcatcaattgtgatatgtgtgaacccgaatgcccgaatgaggcgatttcaatgggagatcatatctacgagattaacagcgataagtgtaccgaatgcgtagggcactacgagacaccaacctgccagaaggtgtgcccgatccccaatactattgtgaaagatccggcgcatgtcgagacagaagaacagttgtgggataaatttgtgctgatgcaccacgcggataaaatttaatattctactctggaagtagagtattaattatattactgggaagccttaacgccattatatttatttaattgatgacattagcataatcattcactaagttaatttatatagtatctgcccagacacttatttatagttattaaaggtgcgtccgactggttcaccggacgcaccttaagtacgtttccttgtgttataagaacagaaggatcagctgtaaaacagcaatgatgattttgatgacccgtttaatcaggtatcggcaatcagtcattcgtttttccttaaacaaggaatgcagccattcagattagcccttacatctccccaaaactgaacgtgcgagttattgagggtgcatgctgcactccacaccagagctttgacgacaccactcgtttcaatgggggaattctgtggcatggtgtaaagcacagcaaaatcttcaataacgaagccaattttaatgtacttacgaattggcggtcacgttaatctttccatcaatattgctttcttcgtaaaggctcgagtttttatgctaaagattgcaagttgcttgtaaaagataagtacactgatccataatcgctgttgttgagggtgcatgctgcacaaaattaaagttaaaaagtaaaacccccgttccttaccagttcgggggttttactttttaaagagaacggtattatttttaactttcaataattaccgtggcacaagcatagtgccgctcatctgccagcgttacatgcatatttgcaacgcccagcttttccgccagttttaatgcctcgccccatagccgtagccgtggtttgccgagctcatcattgaatacttcaaattgattaaacgccagaccattgcggatcccggtgccaaacgcttttgctgcggcttctttcacagcaaaacgcttcgccagaaaacgcaccggctggtggtgcgttttccagatagcccattcgttatcgcttaatacgcggcgtgccaggcgatcaccggatcgggcgatcaccgcttcgatgcgagcgatctccacaatatccgtgcctaaacctaatattgccattagccacgcgcttccagcatcagacgcttcatttctgccaccgcatctttcagtccggtcatcactgcacgaccaataatggcatgaccgatattcagttcatgcatctcagggatggcggcaatggctttcacgttgtgataggtcagaccgtgtccggcgttaactttcagaccgaggcttgcggcaaaggtcgcggctttggcgatacgcgccagctcttgcgcctgttcggcgtcagttttggcatcagcatagcaaccggtgtggatctcgataaacggtgcgccaacctctgccgcagctttgatctgctcttcatcggcgtcaataaacagagaaacctgaatcccggcatctgccagacgtttgcaggcatcgcgcattttgtcacgctgccctgcgacatccaggccgccttcggttgttacttcctgacgcttttccggtaccaggcagcaaaaatgtggcttcgtctcaacggcgatcgccagcatctcttcggtcaccgccatctccagattcatgcgggtatccagcgtctgacgcaggatgcgcacgtcgcggtcagtaatgtgacggcgatcttcacgtaaatgcacggtaatgccgtccgctcccgcctgctcggcaataaacgcggcctgcaccggatccgggtaagcggtaccgcgcgcgttgcgcagcgtagcgatatggtcaatgttgacgcctaacagtaattcagccatgacaatcctcatcattcataatgtgttttcaccgttcgcttaggcataaactgccggaacagttccctgctctttaaaggtttaccgccaagatacggcttaagcgccatgcgggtaaagcgtttcgcggcgcgcagtgtgtctgcgtcaggaaattcccgtgcgtttaacgcttttaactgccttccggtgaacgttttattgtcgataacgacgcttgcgataaaccctttttcttcgcgataacgatacgtcatggtgtcatctaccggctcgccgctacccgcacaatgggtaaaattgacgccataacccagatgcccgagcagtgccagttcaaagcggcgcagcgcgggttctggcgtaccagtgacccctgcaagagactgaatgcagtgcaagtaatcgaaaaaaagttcagagaagcgcgtctcgtattccagtacgcgggagagaagttcgttgatgtacagaccgctgtaaagcgtgataccgcttaatggcagcgccagcgagacggcttcagcactgcgcagcgttttgacttcgccacgcccgccaaaacgtagcaagagaggggtgaaaggctgtaatgcacctttcagggtagagcgtttagagcgtgcgcctttggcaaccagacgcacgcgccccgattcctccgtgaagacgtccagcatcaggctggtttcgctccacgggcgactatgcaggacaaatgcgcgctgccagccttccatcggagttactcttaaagatcgtcaacgtaaccgagactgcgcagtgcgcgttcgtcgtcggcccaaccggatttcacttttacccacagttcaaggtgaacaggcgcttcgaacatttcctgcatgtctttacgcgcttcaatcccgatggttttgatcttggcccctttgttgccaatgaccatcttcttctgcccttcacgctcaacgagaatcaaaccgttgatgtcataaccaccgcgttcgttagagacgaaacgttcgatctccacggtcacggagtacggcagttcagcgccgaggaaacgcatcagtttttcgcggatgatttcagacgccataaaacgctgtgagcgatcggtgatgtaatcttccgggaagtgatgagtcgcttcaggtagatgcttacgcacgattgccgcaatagtgtcaacattcagcccggtttcggcagagattggcacgatatcgaggaagttcatctggcttgccaggaactgcaggtgcggcagcagatcggctttctcctgcacgttgtccactttgttcaccgcgaggattaccggcgctttgccttcgcgcagtttgttgagcaccatttcgtcgtccggcgtccagcgggtgccttcaacgacaaaaatcaccagctcaacatcgccaatagagctgctcgccgctttgttcatcaggcggttaatggcgcgtttttcttccatatgcaggcccggtgtatcgacgtagatcgcctgatacgcgccttcagtatggatccccacaatgcggtgacgagttgtctgcgccttgcgggaagtgatggagattttctgccccagcagtttgttcaacaatgtggatttgccaacgttcggacgtccgacgatggcaataaatccgcagtaacttttatcgatgctcattccagctccagttttttcaacgcctgttcggcggcagcctgctcagccttacgacggcttgaacctgtgccaaccaccggttcactcaggccgctgacctggcagtggatagtaaattcctgatcgtgcgcttcgccacgtacctggactaccagataagtcggcagcggcagatggcgaccctgcaaatattcttgcaagcgcgttttcggatctttttgtttatcgcctgggctaatttcgtccaaacgagtttgataccagttgaggattaatttctcgacggtttgaatatcactgtcgaggaatacgccaccaattaatgcttcgacggtgtcggcgagaattgactcacgacgaaatccaccgcttttaagttcacctggccctaaacgtaagcactcgcctaactcaaattcgcgcgccagttccgccagcgtattgccacggaccagcgtggcgcgcatccggctcatatcgccttcatccacacgagggaaacggtgataaagcgcattggcgataacgtagctcagaatagagtcgcctaaaaattctaaacgctcgttatgtttactgctggcactacgatgagttaatgcctgctgcaacagttcctgatgattaaaagtgtagcccagcttccgttgaagccgattaattacgatggggttcatgcgataccaataaataaatgcgtcaacaattcagcacacgaaacagacctgatatacatggttctgctaactgcttcgctgcagtttcagtttaccggtatatggggaccaacgctgtttcgtgtgccgtggcaacctggaggtgccaaccttaaacttcgggggaatattctatacacaacgacgggggatgtcgttagccacgggagatttatctcataaataattcacgttgtcgccataacggcgacaacgtgaacgaagatggctattaatggatgccgccaatgcgacttaagcgcagaccagtcggccattcgccttcttgcttatcgaagctcatccagatagccgttgcccgaccgaccagattcgcttccggcacaaagccccagtaacggctgtccgcgctgttgtcgcggttgtcgcccatcatgaagtattgtcccggaggaacaatccaggttgccagttgttgccctggctgctggtaatacatccccacctgatcctgcgcaatcggcactgtcagaatgcggtgcgtcacatcacccagtgtctctttacgctcggaaagacgaattccattttctttggtttcgtttttcggcacttcaaagaatccgctggtcgcttccccaccattacggcgtgagaaggtctgaacgaaatcgctcggttccacgtttgagtaggtgaccggcagcgcgttttcacacgcctggccggaactgcatcccggttgaatcgtcagctcttttgagaccggatcgtaagtgactttatcgcccggtaaacccaccgcgcgcttgatgtaatcaagctttggatcttccggatatttaaagaccacgatatcgccgcgtttcggatgaccggtttcgatcagcgttttctggtagataggatctttaatgccataagcaaacttctctaccagaataaaatcaccaattaacagagtcggcatcatcgaacctgacgggatctggaacggttcataaataaacgaacgcacaatcaatacgatagccagtaccggaaaaacagaagcaccggtttccagccagccaggcttcggcgcaacctttttcaacgttgctttatccagtgagtccccggcagccgcctgcgccgctgcctgacgttcccgccgtttaggtgcgaaaaagaatttatccacgcaccataaaatgcccgtcaccagtgtggcaatcaccagaatcagggcaaacatattcgccatgccaactcctaagggttatttgttgtctttgccgacgtgcagaatggcgaggaacgcttcctgcggcagctcgacgttaccgatctgcttcatgcgtttcttaccttctttctgcttctgcagcagctttttcttacggctgatatcgccgccataacatttagccagtacgtttttacgcagctgtttcacggtggatcgcgcaatgatgtgcgtaccaatcgctgcctgaatggcgatatcaaactgctggcgtgggatcagatctttcatcttctccaccaactcgcgaccgcggttttgcgaattatcacggtgggtgatcaacgccagcgcatcaacacgttcaccgttgattaatacgtctacacgtaccatgtcggacgcctggaagcgcttgaagttgtaatccagagacgcataaccacgcgaggtagatttcaggcgatcgaagaagtcgagcaccacttccgccatcgggatctcgtacgtcagcgccacctgattaccgtggtaaaccatattggtctgcacgccgcgtttttctacgcacaacgtaataacgttgccgagatatgcctgcggcagcagcatgtgacactctgcaatcggctcgcgcagttcgtagatgttatttaccgcaggcagcttggatgggctgtcgacgtagataacttctcttgacgtggtttcaacttcatacactacggtcggcgcagtggtgatcagatccagatcgtattcacgttccagacgttcctggatgatctccatgtgcagcaggccgaggaagccgcagcggaaaccaaagcccagcgcgctggagctttccggctcatagaacagtgaggcatcgttcaggctgagtttacccagcgcgtcacggaaggcttcatagtcgtcggaacttaccgggaacagaccggcgtatacctgcggtttgactttcttaaagccaggcagcgccttttctgccggattacgcgccagcgttaaggtatcgccgactggagcgccgtggatatctttaatcgcacatacgagccagcctacttcgccacatttcagttcagtgcggtcaacctgtttcggcgtgaagatgcccagacggtcggcgttataggtctgcccggtactcatgactttcactttgtcgcccttacgcagggtgccgtttttaatacggataagtgaaacaacgcccaggtagttgtcgaaccatgagtcgataattagtgcctgcaacgggccttccggatcgccttccggcggcggaatgtcgcgcaccagacgttcgagaacgtcctgcacaccaacgccggttttcgctgaacagcgcaccgcgtcggtggcgtcgatgccgacgatatcttcaatttcttccgccacgcgttcaggatcggctgccggcaggtcaatcttgttcagtaccggcacaacttcgagatccatttccatggcggtgtagcagtttgccagggtttgcgcttctacgccctgcccggcgtcgaccaccagcaatgcaccttcacaggcagccagcgaacgggaaacttcataggagaagtctacgtggcccggggtgtcgataaagttaagctgataggtttcgccgtcagacgctttgtagtccagcgtcacgctttgcgctttgatggtaatgccacgctcacgctcaagatccatggaatcgagaacctgcgcctccatttcacggtcagacaggccaccgcagatctggataatacggtcagacagcgtcgatttaccgtggtcaatgtgagctatgatcgaaaagttacgtatattcttcataaagtatgattattgtgccttaatgcccggttaaccaggcttttagaagtcgctgttctgagcttaacgtctgtattaatagaaacgccgcattctacactacaacattgaggcgaggaaatgttcataccgtatggattgtggtatctggaaacgtcctcgcatttgttatgcaaaatgcaacaaagccagtgaaatcactggctcgcgtcttccgaagatgtttcaaatcgcacaaggccaggcggcaatgccacgcttaagatgatcggttgccattctgcccgggcagcaaacttacgcgagtagccgcgcgcaatcaggaacccgccaataccaccgaggatcgcaccacataatgctgcgacgtcagaagcaaagagtagctgaaatagcgaagcgataaggaataatcccaccagcggcgacatataaaccagtaatgcggagctaagcaggctgccttcggcgatccccaattccactttttgccccggcactaacggctcatcacagggtacgacaatggtatgcgtggtttgcgggccaagtttatttaacacgcggctaccgcaaccggcgcgtgaagcgcagctgctgcatgaagctttaacatcacaactgaccagcgcctgcccgttttgccaggagacgacggtagcccactctttgatcattgcgctgccccgaacttaatattctcggcaatgcgtttcgccgtttgcggcggcagttcaccgacaatggtgatttcggcgttatcacgtacgcttgtactgacggttctgcgtccggtgcgcaacatctgatcggtgctcgatggcgtagcgcggttaacgtttaccgagaagctgaataatccgtcggaatagagacgtgattcgataggcatgttgtccatcgtcggtagcggacgtcgactactggaaacttcgctaaaaccctgtggcaaccaggttggcgtccagctgaatttagctttttcacctacaggaacagaaagcaacggcggcaaatttgccttcgccagcgtctgcatactgctgctgatatcctgattgacgttaaaagcaatcacgcgaaattgttccagcgtttcaccatcgcgatcaaggagatcaacccgcatcggtaatttcgattcggtgtccatccacacgatgtagctgtagcgtgtaccatctcgggcaaccacgcgaatgacttcgcaaagacgatcagcaatacgcgtgcgcccgacggagataaagtcgtagtaaggagaaaggcgtttgaaatcggtatagataagcgatggcagagaatcaacaatgtaatcgccattaagcgtgaacggttcaagtcccggttcaaaatagctgatttcattgccgcgctgtaccacttcccggcgcgggccatccatttgcaacaattgtgcaagaggacggttatcgaggcgtgcatgtcgataacgcagagactcaacaccctgtttattgatgctgatgaatgacagctcgtaattcagtgactgactggccaggttcatctgctgtaataacgccccggacgcgggagtggccgaggcgttagcagagaataacaggctacctgtcactaatgacatggcaaaccaaagttgcttcattactgcgattgcgttcctaaagtttgaattcctggcacctgtacagcggcttgctgggtttgcgcctgctcaaactgaagctgttcagagtggagtcggcgttgcagttcgtaatcctgcaacattgcattaatgcgacgacgctgctcctgtacctgctgctgttgaccattgtttgcggtcgcttcagaaggtactcccaggcttaccgggctggctttacccatcatcggcagtgtattaaataccggcgtttcgggctgctgggacgtttcagattgtccattatagtgctggacgccaacgataactgcaagcgatacgcatgcggctacgcccatttgggtaagctgtgccgcccacggacgtactttctgccagaatggcattttctgccattgatgcggcgcaggctgggcttccgggatcaatgtcgccggttgacgtactggctcttcttcaatggcggccatcacgcgtgaagagatatcgaaatggagcacctcgggagtatcaccccgcattgagtcacggattaagtgatagctttcccaggttttctgcatttctgggttatgagccagttcgttaagcagctcactatccagcgtttcgccatccattaaagcggaaagttgttctttctgcatgcctaatacccttatccagtatcccgctatcgtcaacgcctgataagcggttgaactttgttatcaatagcttccctcgctcggaagatacgtgaacgcaccgtacctaccggacaatccatgatagcggctatctcttcatagctcaggccatccagctcccgcaaggttattgccatgcgtaaatcttccgggagggactcaatagttcggaaaactatctgtctcagttcttctgacaacattaagttctcagggttcgaaatttctttcaacgcgccgccactttcgaagttttcagcttcaatggcatccacatcactggaaggtggacgacgcccctgagcaaccaggtaatttttcgctgtatttacagcaatccgatacagccatgtataaaaagcgctatctccccggaacgaatccagcgcacgataggctttaataaaagcttcttgtaccacatcgggaacatcacccgacggcacatagcgggaaaccagactcgccactttatgctgatagcgcactaccagtaagttaaaggctttctgatctcccttctggacccgttcaaccaggacctggtccgttaactgctcgctcatccgaggtaaagtctccccaaaccaaatttccacgcgctatcgaaacgccactccattagctgcaatttgagcaagcaaagggttagagtgtctcgtttttgtaaagttccgtaacgcatctgtttttgtttgtcatgctgtagacggatcattatctatcattataagtctacagaatctgaacatcgcattatctgtgtagaaatgcccatttaactgcctgaagagtaacccaacggcctttttatttcaccacctaatcctccaccagccagtaacttctctttttctcgccgccctgcgtcagcgtgtttagcaactgtaacaaatattaaaatagcaggtgtttatccgcacaacatgatgctatgctgaccaaaccatgtttagtaaattaaacaaagaaaatgaatactctccctgaacattcatgtgacgtgttgattatcggtagcggcgcagccggactttcactggcgctacgcctggctgaccagcatcaggtcatcgttctaagtaaaggcccggtaacggaaggttcaacattttatgcccagggcggtattgccgccgtgtttgatgaaactgacagcattgactcgcatgtggaagacacattgattgccggggctggtatttgcgatcgccatgcagttgaatttgtcgccagcaatgcacgatcctgtgtgcaatggctaatcgaccagggggtgttgtttgatacccacattcaaccgaatggcgaagaaagttaccatctgacccgtgaaggtggacatagtcaccgtcgtattcttcatgccgccgacgccaccggtagagaagtagaaaccacgctggtgagcaaggcgctgaaccatccgaatattcgcgtgctggagcgcagcaacgcggttgatctgattgtttctgacaaaattggcctgccgggcacgcgacgggttgttggcgcgtgggtatggaaccgtaataaagaaacggtggaaacctgccacgcaaaagcggtggtgctggcaaccggcggtgcgtcgaaggtttatcagtacaccaccaatccggatatttcttctggcgatggcattgctatggcgtggcgcgcaggctgccgggttgccaatctcgaatttaatcagttccaccctaccgcgctatatcacccacaggcacgcaatttcctgttaacagaagcactgcgcggcgaaggcgcttatctcaagcgcccggatggtacgcgttttatgcccgattttgatgagcgcggcgaactggccccgcgcgatattgtcgcccgcgccattgaccatgaaatgaaacgcctcggcgcagattgtatgttccttgatatcagccataagcccgccgattttattcgccagcatttcccgatgatttatgaaaagctgctcgggctggggattgatctcacacaagaaccggtaccgattgtgcctgctgcacattatacctgcggtggtgtaatggttgatgatcatgggcgtacggacgtcgagggcttgtatgccattggcgaggtgagttataccggcttacacggcgctaaccgcatggcctcgaattcattgctggagtgtctggtctatggctggtcggcggcggaagatatcaccagacgtatgccttatgcccacgacatcagtacgttaccgccgtgggatgaaagccgcgttgagaaccctgacgaacgggtagtaattcagcataactggcacgagctacgtctgtttatgtgggattacgttggcattgtgcgcacaacgaagcgcctggaacgcgccctgcggcggataaccatgctccaacaagaaatagacgaatattacgcccatttccgcgtctcaaataatttgctggagctgcgtaatctggtacaggttgccgagttgattgttcgctgtgcaatgatgcgtaaagagagtcgggggttgcatttcacgctggattatccggaactgctcacccattccggtccgtcgatcctttcccccggcaatcattacataaacagataaaaagcctgggtcagcgccgtatacgcttcggaatagttctggtctggcccacgaatgactaagcgatcgctaaagcattctcccgcctgcggggagaatgccagcagcacccgatgcggcagtcgcgcttcgttttccgccacatccgtccgcaaacgtaaatgccagcccatgcttaatgccagctccgtaaaaccattaccaatctgctctggcagcactacgcagaaaaatccctcttcggtaatgcactccgccgcacaggtcagcaacgatgggtgatcaagcgtagtggtatagcgagcctgttcccgttgaggtgtcgagcactctactccctgctgatagtaaggtgggttactgatgattaaatcgaagcgtactgtctgctgtgtgatccactgctgaatatccgccgtatggacgttaatccgctctgcccacggggactggttgatattttcctgcgcctgcgcggcagcttcactttccagttcaactgcatcaatcatcacgctgtcatcggttcgctgcgccagcattaatgccagcaacccgctacccgcgccgatatcaaggcaacgttttaccccagccaccggtgcccatgcgcccaataaaataccatccgttcccactttcatcgcacagcgatcgtgagcaacaaaaaactgtttaaaagtaaatccattacgacgaagcacggatgtagactgtgacatgaaaataaaaccttgcaggaaaaacggcgatagcaccgggtgagaacaatacccgagaagcgatatccatacaaacagatgaagattgcagccgtaacgtctataatcagcgccccacacagaggtagaacatgactgtaacgactttttccgaacttgaactcgacgaaagcctgctggaagccctccaggataaaggtttcactcgcccgaccgccattcaggctgccgccattccgcctgcgctcgatggccgtgatgtactcggttctgcgccgacaggcaccggtaaaacggcggcgtatctgctgccagcgttgcagcacctgctcgatttcccgcgtaagaaatccggtccgccgcgtattttgatcctcaccccaactcgcgagctggcgatgcaggtgtccgatcatgcccgcgaactggcgaaacatacgcatctggatatcgccaccatcaccggcggcgtagcctatatgaaccacgcggaagtgttcagcgaaaatcaggacatcgtggtcgccacgaccggacgtctgctgcaatacataaaagaagagaacttcgattgccgcgcggttgaaacgctgatcctcgacgaagcagaccgtatgctggatatgggcttcgctcaggatatcgaacatattgctggcgaaacgcgctggcgtaaacagaccctgctcttttcggcaacgctggaaggcgatgcgattcaggactttgccgagcgtctgctggaagatccggtggaagtttctgccaatccctccacccgtgagcgcaaaaaaattcatcagtggtattaccgcgccgatgatcttgagcataaaaccgcgttgctggtgcatctgttaaaacagccggaagcgacccgctcaattgtgtttgtgcgtaagcgtgagcgtgtgcatgagctggcaaactggctgcgcgaagcgggcatcaacaactgctatctcgaaggtgagatggtacagggcaagcgtaacgaagcgatcaagcgtttgaccgaaggtcgcgtaaacgtactggtcgcaaccgatgttgccgcgcgcggtatcgacattcctgacgtcagccacgtctttaacttcgatatgccgcgcagtggcgatacttatttgcaccgtatcggacgtaccgcgcgcgccggtcgtaaaggcaccgcaatttcgctggtggaagcccatgaccatctgctgctgggtaaagtaggccgctatattgaagagccaattaaagctcgcgttattgatgagttacgcccgaaaacgcgtgcgccaagcgaaaagcagaccggcaagccatcgaagaaagtactggctaaacgtgctgagaagaaaaaagctaaagagaaagagaagccgcgggtgaaaaaacgccatcgcgacaccaaaaatattggtaagcgccgtaaaccaagcggaacgggcgtgccaccgcaaacgacagaagagtaatctcaatgccaggtttaagcctggtattaaaagtgctggcaaacgcaaaactgcctgatgcgctacgcttatcaggcctacgtggctcatgcaatatattgaatttgcacgatcttgtaggccggataaggcgttcacgccgcatccggcatgaataaagcgcactttgtcgacaagttaaatgccgggtttaatcccgacattatttttatccagccacaaaactctcttcaacacactgaataaaagtgtgcatcgccgggctaaccgcttttccagcatgatgtgcgcacatggccgtaatggtctgcgactgttcgccaaaaggcaattcaattaattctccgcactccaactcttttgccaccgcaaagcgcggtaggtagctgaccccgatattcgccgcgacacaacgcttgatgctttcgatacttataagctcaatggtgttttccaccgtgatccgccgctgacgcagcgtgctctcaaatatctgccggaagacacattgcggttcgttgataataaagctacaggcgttatgtcttcccggctcagtaaaatcgacatctgcaatttgcggtgaagccaccagcaccagtgattgttcacccaactctcgtcgattcagagcatcatcattccctacacgataaaagacgccaacatcggcctcatcattcagtagcgcatcacggatcacgtaacagttcagcgactgcaacgataaacgcacttttggggcgcgttgccgaaaacgctgcaacacctgcggcattcggtaagagagcaacgtttcgcccgaaacaacgcgtagttccccgtccggatctgactcctttttggcagcctcacgaagcgtatccatcactcgggtaagttcataaatgtgcggcagcaacttttttccttcgcgggtaaggcacatccgtcggccaattttctcaaataactggactgaaaactcctgctcaagctgctgaatatgaaaagtcaccgtcgattgtgtacagcacaatttttgcgaagctcgcaaaaaggaaccctcttccaccacggttttaagcgtaataaaacggcgcagatccataaccccaaacctatcgaaaatatcgaatctagaatataaaaacattcatttttttaaatgttccgtgtcgggtactgtctaccaaaacagaggagataacaagtgacaccgacccttttaagtgctttttggacttacaccctgattaccgctatgacgccaggaccgaacaatattctcgcccttagctctgctacgtcgcatggatttcgtcaaagtacccgcgtgctggcagggatgagtctgggatttttgattgtgatgttactgtgtgcgggcatttcattttcactggcagtgattgacccggcagcggtacaccttttgagttgggcgggggcggcatatattgtctggctggcgtggaaaatcgccaccagcccaacaaaggaagacggacttcaggcaaaaccaatcagcttttgggccagctttgctttgcagtttgtgaacgtcaaaatcattttgtacggtgttacggcactgtcgacgtttgttctgccgcaaacacaggcgttaagctgggtagttggcgtcagcgttttgctggcgatgattgggacgtttggcaatgtgtgctgggcgctggcggggcatctgtttcagcgattgtttcgccagtatggtcgccagttaaatatcgtgcttgccctgttgctggtctattgcgcggtacgcattttctattaacgaaaaaaagcggaagaggtcgccctcttccgcttagtaacttgctacttaagccttacaggctttcagtaaaggtacgagcgataacgtcgcgctgctgttccggagtcagagagttaaagcgaactgcataaccggatacacggatggtcagctgcggatatttttccggatgcttaactgcatcttccagagtttcgcgacgcagaacgttaacgttcaggtgttgaccaccttcaacgcgaacttctggtttcacttctactggaacttcacggtattcaatgtcacccagtttgcttactgcaaccacttcatcttctgcataacctgcttttgcaacgatgcaacgcgcttcgcctttttcgctgtccagcagccagaaagagttcagcagatcgtcgttagcggctttagtaatctggatacctgtaatcatgtgatgcctccccggcaaaattatttgatttgttcagcctgtcgcggccaattggtaaaaccattgttgcttgagtgtatatatactcctcaaacacccttgaatctttgatttaaatcaataaaaaccacacatcaagtatggtcgcaaatggattttattgttttacatcaacttatgcgggtgtgaaattttaccaatttacatttttttgcactcgtttaagtctaaaaaatgagcatgattttgttctgtagaaagaagcagttaagctaggcggattgaagattcgcaggagagcgagatggctaacgaattaacctggcatgacgtgctggctgaagagaagcagcaaccctattttcttaatacccttcagaccgtcgccagcgagcggcagtccggcgtcactatctacccaccacaaaaagatgtctttaacgcgttccgctttacagagttgggtgacgttaaagtggtgattctcggccaggatccttatcacggaccgggacaggcgcatggtctggcattttccgttcgtcccggcattgccattcctccgtcattattgaatatgtataaagagctggaaaatactattccgggcttcacccgccctaatcatggttatcttgaaagctgggcgcgtcagggcgttctgctactcaatactgtgttgacggtacgcgcaggtcaggcgcattcccacgccagcctcggctgggaaaccttcaccgataaagtgatcagcctgattaaccagcatcgcgaaggcgtggtgtttttgttgtggggatcgcatgcgcaaaagaaaggggcgattatagataagcaacgccatcatgtactgaaagcaccgcatccgtcgccgctttcggcgcatcgtggattctttggctgcaaccattttgtgctggcaaatcagtggctggaacaacgtggcgagacgccgattgactggatgccagtattaccggcagagagtgagtaaatttgcggggaaatgccggatggcagagttgccacccggctgatttatcaggctttattctgacgccaccattcaccaagcaaaacgccggttgcgacagagatattcagcccggcaacgttgcccgtaccgtcaatcttcacgcgcagatcgttcggatcgcgtgcggcatccggtaacccttcatattcctgacccagcaccagtaccattttcgctggcagactagttttgaacagcggtttaccctgctcgctggaagtggtcactacggtgtaacctgcctgacggaaatcatccagcacgttaacaatgttgtcgccagtaatcggctgaacgtgctctgcgccgccttctgcggtacggatagccgcccccgactccagcagtgccgcatcctgcaccacgacacctttcacgccgaagtgcgcgcagctgcgcatcatgccacccaggttatgcgggttagattcgttttccagtgccagaacgcaatcctgcgcgcctgcctggcttacccactgctgcacggttgtaccgttacgctttttgatcaagaagcaaacgccgccgtgatgttccgtgcctgacgcttttgtcaattccgcttcatccaccacatggtacgctttgcggtttgctgccatccagcgcaaagcttctttaaaacgcggcgttacactctggataaaccaggcgcgaacaatcgcttccggacggctctggaaaagtgcctgacatgcattttcgccgtagacgcgggtttcttccgcacgctgacgacgcaacacttccggatcaataaaacttttaccactgatgccaccgtgatcggccttttccggcgtctcatcacccggcgcgcgggaaaccgtgcgccacggcgaatcttcccacttgcggtcacggggctgactctgtttgtcatcgcgggcggggcgacggccaccgtcagcacgagattttcctggacgcccgccccctttcccggtacgcgggttgtgggtacgtttatcagaatcatcatcactgcggacatacatcactttgaccttgccgcttttacctttcatttcatcgttcatgcttttctccaccagcgctgcgcgaagcgcgcagattacccgaagtccgcgcggttcgccatgatttcgtaccaaagcctgcgactatcatacctattgaataaaacagattgttgtctggaacaatgtccccgataatatgtaacatattagaaacataccggcgtcgttgccgataagtctccttactcatcccgaggttagttatgaataccgtttgtacccattgtcaggccatcaatcgcattcccgacgatcggatcgaagatgcggcaaaatgcggacgctgcggtcacgacttgtttgacggagaggtgattaatgcgaccggtgaaacactcgacaaattgctgaaggatgatctacctgtggtgatcgacttctgggcaccgtggtgcggcccctgccgtaatttcgcaccaatttttgaagatgtcgcgcaagagcgtagcggtaaagtgcgctttgtgaaagtgaataccgaagctgaacgtgaattgagcagtcgctttggaattcgtagtataccgacgatcatgattttcaaaaacggtcaggttgtcgacatgcttaatggcgcagtaccgaaagcgccgttcgatagctggctgaacgaatctctttaatcttaccggggcgcatcttgtgccccgttttctcctctgcgacaatggcgttttttcgacgctctcttatgaccgaaaacgctgttctccagttacgcgccgagcgtattgcgcgcgcaacacgtccttttcttgcccgcggtaatcgcgttcgtcgctgccaacgctgtcttttgccagagaaattatgtctctgttcgacaattaccccagcacaagcaaaaagtcgcttctgtttgctgatgttcgacaccgagccaatgaagcccagtaataccgggcgtctcattgctgatattttgcctgataccgttgcgtttcaatggtcgcgtaccgaaccctcgcaggatttgctggagttggtgcaaaacccggactatcagccaatggtggtctttcccgcttcgtatgctgatgagcaacgggaagtgatcttcacaccacctgccggtaagccaccgctgtttatcatgctcgatggtacctggccggaagctcgcaagatgtttcgtaaaagtccgtatctggataatcttcccgtcatttccgtcgatctttcccggctttctgcctatcgcctgcgtgaagcccaggctgaaggccaatattgtactgccgaggtagccatcgcactgttagatatggccggcgataccggggcggcggcagggttaggcgagcattttacccgctttaaaacacgctatctggcaggaaaaacgcaacatctgggtagcatcacagcagaacagttagaaagcgtttaaaatcattcggtcacttctgcgggagaccggtatgagtcagcgaggactggaagcactactgcgaccaaaatcgatagcggtaattggcgcgtcgatgaaacccaatcgcgcaggttacctgatgatgcgtaacctgctggcgggaggctttaacggaccggtactcccggtgacgccagcctggaaagcggtgttgggtgtgttggcctggccggatattgccagcttgccctttacacccgaccttgcggttttatgtaccaatgccagccgtaatcttgctcttctggaagagctcggcgagaaaggctgtaaaacctgcattattctttccgccccggcatcgcaacacgaagatctccgcgcctgcgccctgcgccataacatgcgcctgcttggaccaaacagtctgggtttactggctccctggcaaggtctgaatgccagcttttcgcctgtgccgattaaacgcggcaagctggcgtttatttcgcaatcggctgccgtctccaacaccatcctcgactgggcgcaacagcgtaagatgggcttttcctactttattgcgctcggcgacagcctggatatcgacgttgatgaattgcttgactatctggcacgcgacagtaaaaccagcgccatcctgctctatctcgaacagttaagcgacgcgcgacgctttgtttcggcggcccgtagtgcctcgcgtaataaaccgattctggtgattaaaagcggacgtagcccggcggcacagcgactgctcaacacgacggcaggaatggacccggcatgggatgcggctattcagcgtgccggtttgttgcgggtacaggacacccacgagctgttttcggcggtggaaacccttagccatatgcgcccgctacgtggcgaccggctgatgattatcagcaacggtgctgcgcctgccgcgctggcgctggatgccttatggtcacgcaatggcaagctggcaacgctaagcgaagaaacctgccagaaactgcgcgatgcactgccagaacatgtggcaatatctaacccgctcgatctacgcgatgacgccagcagtgagcactatattaaaacgctggatattctgctccacagccaggattttgacgcgctgatggttattcattcgcccagcgccgctgctcccgcaacagaaagcgcgcaagtattaattgaagcggtaaagcatcatccccgcagcaaatatgtctctttgctgacgaactggtgcggcgagcactcctcgcaagaggcacgacgtttattcagcgaagccgggctgccgacctaccgtaccccggaaggaaccatcactgcttttatgcatatggtggagtaccggcgtaatcagaagcaactacgcgaaacgccggcgttgcccagcaatctgacttccaataccgcagaagcgcatcttctgttgcaacaggcgattgccgaaggggctacgtcgctcgatacccatgaagttcagcccatcctgcaagcgtatggcatgaacacgctccctacctggattgccagcgatagcaccgaagcggtgcatattgccgaacagattggttatccggtggcgctgaaattgcgttcgccggatattccacataaatcggaagttcagggcgtcatgctttacctgcgtacagccaatgaagtccagcaagcggcgaacgctattttcgatcgcgtaaaaatggcctggccacaggcgcgggtccacggcctgttggtgcaaagtatggctaaccgtgctggcgctcaggagttgcgggttgtggttgagcacgatccggttttcgggccgttgatcatgctgggtgaaggcggtgtggagtggcgtcctgaagatcaagccgtcgtcgcactgccgccgctgaacatgaacctggcccgctatctggttattcaggggatcaaaagtaaaaagattcgtgcgcgcagtgcgctacgcccattggatgttgcaggcttgagccagcttctggtgcaggtttccaacttgattgtcgattgcccggaaattcagcgtctggatattcatcctttgctggcttctggcagtgaatttaccgcgctggatgtcacgctggatatctcgccgtttgaaggcgataacgagagtcggctggcagtgcgcccttatccgcatcagctggaagaatgggtagaattgaaaaacggtgaacgctgcttgttccgcccgattttgccagaagatgagccacaacttcagcaattcatttcgcgagtcaccaaagaagatctttattaccgctactttagcgagatcaacgaatttacccatgaagatttagccaacatgacacagatcgactacgatcgggaaatggcgtttgtagcggtacgacgtattgatcaaacggaagagatcctcggcgtcacgcgtgcgatttccgatcctgataacatcgatgccgaatttgctgtactggttcgctcggatctcaaagggttaggcttaggtcgacgcttaatggaaaagttgattacctatacgcgagatcacggactacaacgtctgaatggtattacgatgccaaacaatcgtggcatggtggcgctagcccgcaagctcgggtttaacgttgatatccagctcgaagaggggatcgttgggcttacgctaaatcttgcccagcgcgaggaatcatgagtaaggtactggaaatgttgaccacttaatcgggactggtgttattattgcccgcttatgtcgtctgcattgcacagaggacccttcaatgaacagagaagaaatgcactgtgatgttgtcaaaatttaagcgtaataaacatcaacaacaccttgcccaactacccaagatttctcaatcagttgatgatgtcgatttcttttacgctcccgccgacttccgggagacgctgctggaaaaaatagccagcgcgaagcagcgcatttgcattgtcgccctgtatctcgaacaggatgacggtggcaaaggcattctgaacgcgttgtatgaggctaaaaggcagcgtccggaactggatgtgcgggtgctggtcgactggcatcgtgcacaacgtggacgcattggcgctgcggcatctaacactaacgctgactggtactgccgcatggcgcaggaaaatccgggcgtagatgttccggtttatggcgttccaatcaatactcgtgaagcccttggtgttctgcactttaaaggctttatcatcgacgatagcgtactttatagcggtgccagcctgaacgatgtttacctgcatcagcacgataaatatcgctacgaccgttatcatctgatccgtaaccgtaagatgtcagacattatgtttgaatgggttacacagaatattatgaatggccgcggcgttaatcgtctggatgatgttaatcggccaaaaagcccggaaatcaagaacgatattcgtctgttccgccaggagctgcgtgatgccgcttatcatttccagggcgatgccgacaacgatcagctttctgtaacgccgctagtggggctggggaaatcgagtctgttgaacaagaccattttccatcttatgccttgtgccgagcagaaactaaccatctgtacgccatacttcaacctgccagcaatccttgtgcgcaatattatccagttgctgcgcgaagggaaaaaggtcgaaattattgttggtgataaaaccgcgaatgacttctacattccggaagatgaacctttcaagataattggcgcattgccttatctctatgagatcaatctgcgtcgtttcctgagccgtttgcagtattacgtcaatactgaccagctagtggttcggttatggaaagatgacgacaacacctatcacctgaaagggatgtgggttgatgataagtggatgttgatcaccggtaataacctgaacccgcgcgcctggcgtctggatctggaaaacgccattttgatccacgatccgcaacttgagctggcgccacagcgagagaaagaactggagctgatccgcgagcataccaccatcgttaagcactatcgcgatctgcaaagtattgccgattatccggtgaaggttcgtaaactcatccgccgtttgcgccgtatccgcatcgaccgattaattagccgcatcctgtaatcacaaccccgtcctgtacggggtttgttttttggaggccacgttttgcgtattctttttgtctgttcgctattgttactttctggatgcagccatatggctaacgatagctggagcgggcaggataaagctcaacactttatcgcctcggcgatgctttccgccgccggaaatgaatattcacagcatcaggggatgagccgggatcgcagtgccatgtttggattgatgttctctgtcagtttgggggcgtcaaaagagctttgggatagccgccccgaagggagcggctggagctggaaggatttggcctgggatgtcgccggtgcaagcaccggctataccgtctggcaactgacccgtcactaaagacgcatccccttccctttgcgatgtagcatcaaagaaaccagaaacgccaccacggccatcaaggtcacataccagaagaaggctgtttccattcctattgatttcagcgacaacgctacgtactccgccgaaccaccaaatatagcattagcgaccgcatatgacagaccaacgcctaatgcgcgaacctgtgccgggaacatctcagccttcagtattccactgattgatgtataaaaactcactatcagcagggcacacatcaccagaccaaaagcggcataaggcgaggaaacgttttgcaatgctgagagaataggaacggtaaaaatggctgccagcgaaccgaaacataacattgaggtacggcgaccaatcttatccgacagcgcgccaatgagtggttgaataagcatgaatacaaacaatgcggcagtcataatgccactcgccacgttggcatgcattcccgcagtatttaccagatacttctgcatataagtagtgaaggtatagaaacaaagggagcccgcagcggtaaaaccgagaaccatgatgaatgcacggcgattgcgccataatcctttcagagatccagcttcttttaaagcgcgcgtttcttgttgcgaagtttcatctaactgacgacgtaaccacaacgccacaacagctaacacagctcctaacgcgaaaggaatacgccatccccactctctgagtgcagcgtcttccatggtgtgttgtaaaaccacgacaaccagtagggctagcagttgtccgccgatcaacgtcacatactgaaatgatgcgtaaaaacctttgcgcccttcaacggcaacttcactcatataggtggcgctggtgccatattctccgccaacagataatccctgaaataaacgagcgagaagcaataatgccggagcccacgtacctatagtttcataacctgggaggcaggcgataaccagcgatccgaaacacatcatacacaccgataacagcatcgattttttgcgaccatgtttatcggctatgcggccaaatagccaaccgcctattgggcgcatcaggaatcccgcagcaaaaacacctgctgtttgtagtagttgagtcgtcgtgttcccggaagggaagaagatgtgggcaaagtagagtgaacagaacgagtagacatagaaatcgaaccactcgaccagattacctgaagaggcccccacaatcgcccaaatgcggcgacgagtatcactacttgtcagtttgctgtctgccgttacagtactttcagccatgccattatgtctcctgccgtaatccgatgcttttgtcggtcgcttttgtttattttttttgtaaaggaaatattatacatttgttgcatatcattatgcaaccttaaccatgaatttagttagcaggaaaatggttattgaggagcttaaggataaatttctggtaaggaggacacgtatggaagtgggcaagttggggaagccgtatccgttgctgaatctggcatatgtgggagtataagacgcgcagcgtcgcatcaggcatttttttctgcgccaatgcaaaaaggccatccgtcaggatggcctttcgcataatttgatgcctggcagttccctactctcgcatggggagaccccacactaccatcggcgctacggcgtttcacttctgagttcggcatggggtcaggtgggaccaccgcgctacggccgccaggcaaattctgttttatcagaccgcttctgcgttctgatttaatctgtatcaggctgaaaatcttctctcatccgccaaaacagcttcggcgttgtaaggttaagcctcacggttcattagtaccggttagctcaacgcatcgctgcgcttacacacccggcctatcaacgtcgtcgtcttcaacgttccttcaggacccttaaagggtcagggagaactcatctcggggcaagtttcgtgcttagatgctttcagcacttatctcttccgcatttagctaccgggcagtgccattggcatgacaacccgaacaccagtgatgcgtccactccggtcctctcgtactaggagcagcccccctcagttctccagcgcccacggcagatagggaccgaactgtctcacgacgttctaaacccagctcgcgtaccactttaaatggcgaacagccatacccttgggacctacttcagccccaggatgtgatgagccgacatcgaggtgccaaacaccgccgtcgatatgaactcttgggcggtatcagcctgttatccccggagtaccttttatccgttgagcgatggcccttccattcagaaccaccggatcactatgacctgctttcgcacctgctcgcgccgtcacgctcgcagtcaagctggcttatgccattgcactaacctcctgatgtccgaccaggattagccaaccttcgtgctcctccgttactctttaggaggagaccgccccagtcaaactacccaccagacactgtccgcaacccggattacgggtcaacgttagaacatcaaacattaaagggtggtatttcaaggtcggctccatgcagactggcgtccacacttcaaagcctcccacctatcctacacatcaaggctcaatgttcagtgtcaagctatagtaaaggttcacggggtctttccgtcttgccgcgggtacactgcatcttcacagcgagttcaatttcactgagtctcgggtggagacagcctggccatcattacgccattcgtgcaggtcggaacttacccgacaaggaatttcgctaccttaggaccgttatagttacggccgccgtttaccggggcttcgatcaagagcttcgcttgcgctaaccccatcaattaaccttccggcaccgggcaggcgtcacaccgtatacgtccactttcgtgtttgcacagtgctgtgtttttaataaacagttgcagccagctggtatcttcgactgatttcagctccatccgcgagggacctcacctacatatcagcgtgccttctcccgaagttacggcaccattttgcctagttccttcacccgagttctctcaagcgccttggtattctctacctgaccacctgtgtcggtttggggtacgatttgatgttacctgatgcttagaggcttttcctggaagcagggcatttgttgcttcagcaccgtagtgcctcgtcatcacgcctcagccttgattttccggatttgcctggaaaaccagcctacacgcttaaaccgggacaaccgtcgcccggccaacatagccttctccgtccccccttcgcagtaacaccaagtacaggaatattaacctgtttcccatcgactacgcctttcggcctcgccttaggggtcgactcaccctgccccgattaacgttggacaggaacccttggtcttccggcgagcgggcttttcacccgctttatcgttacttatgtcagcattcgcacttctgatacctccagcatgcctcacagcacaccttcgcaggcttacagaacgctcccctacccaacaacgcataagcgtcgctgccgcagcttcggtgcatggtttagccccgttacatcttccgcgcaggccgactcgaccagtgagctattacgctttctttaaatgatggctgcttctaagccaacatcctggctgtctgggccttcccacatcgtttcccacttaaccatgactttgggaccttagctggcggtctgggttgtttccctcttcacgacggacgttagcacccgccgtgtgtctcccgtgataacattctccggtattcgcagtttgcatcgggttggtaagtcgggatgacccccttgccgaaacagtgctctacccccggagatgaattcacgaggcgctacctaaatagctttcggggagaaccagctatctcccggtttgattggcctttcacccccagccacaagtcatccgctaatttttcaacattagtcggttcggtcctccagttagtgttacccaaccttcaacctgcccatggctagatcaccgggtttcgggtctataccctgcaacttaacgcccagttaagactcggtttcccttcggctcccctattcggttaaccttgctacagaatataagtcgctgacccattatacaaaaggtacgcagtcacacgcctaagcgtgctcccactgcttgtacgtacacggtttcaggttctttttcactcccctcgccggggttcttttcgcctttccctcacggtactggttcactatcggtcagtcaggagtatttagccttggaggatggtccccccatattcagacaggataccacgtgtcccgccctactcatcgagctcacagcatgtgcatttttgtgtacggggctgtcaccctgtatcgcgcgcctttccagacgcttccactaacacacacactgattcaggctctgggctgctccccgttcgctcgccgctactgggggaatctcggttgatttcttttcctcggggtacttagatgtttcagttcccccggttcgcctcattaacctatggattcagttaatgatagtgtgtcgaaacacactgggtttccccattcggaaatcgccggttataacggttcatatcaccttaccgacgcttatcgcagattagcacgtccttcatcgcctctgactgccagggcatccaccgtgtacgcttagtcgcttaacctcacaacccgaagatgtttcacttcagagttgcgaaaatttgagagactcacgaacaactttcattgttcagtgtttcaattttcagcttgatccagatttttaaagagcaaatatatcaaacaagacttaacagtctgttttgagatattgaggtcggcgactttcactcacaaaccagcaagtggcgtcccctaggggattcgaacccctgttaccgccgtgaaagggcggtgtcctgggcctctagacgaaggggacacgaaaattgcttatcacgcgttgcgtgatattttcgtgtagggtgagctttcattaatagaaagcgaacggccttattctcttcagcctcactcccaacgcgtaaacgccttgctattcacttttcatcagacaatctgtgtgagcactgcaaagtacgcttctttaaggtaaggaggtgatccaaccgcaggttcccctacggttaccttgttacgacttcaccccagtcatgaatcacaaagtggtaagcgccctcccgaaggttaagctacctacttcttttgcaacccactcccatggtgtgacgggcggtgtgtacaaggcccgggaacgtattcaccgtggcattctgatccacgattactagcgattccgacttcatggagtcgagttgcagactccaatccggactacgacgcactttatgaggtccgcttgctctcgcgaggtcgcttctctttgtatgcgccattgtagcacgtgtgtagccctggtcgtaagggccatgatgacttgacgtcatccccaccttcctccagtttatcactggcagtctcctttgagttcccggccggaccgctggcaacaaaggataagggttgcgctcgttgcgggacttaacccaacatttcacaacacgagctgacgacagccatgcagcacctgtctcacggttcccgaaggcacattctcatctctgaaaacttccgtggatgtcaagaccaggtaaggttcttcgcgttgcatcgaattaaaccacatgctccaccgcttgtgcgggcccccgtcaattcatttgagttttaaccttgcggccgtactccccaggcggtcgacttaacgcgttagctccggaagccacgcctcaagggcacaacctccaagtcgacatcgtttacggcgtggactaccagggtatctaatcctgtttgctccccacgctttcgcacctgagcgtcagtcttcgtccagggggccgccttcgccaccggtattcctccagatctctacgcatttcaccgctacacctggaattctacccccctctacgagactcaagcttgccagtatcagatgcagttcccaggttgagcccggggatttcacatctgacttaacaaaccgcctgcgtgcgctttacgcccagtaattccgattaacgcttgcaccctccgtattaccgcggctgctggcacggagttagccggtgcttcttctgcgggtaacgtcaatgagcaaaggtattaactttactcccttcctccccgctgaaagtactttacaacccgaaggccttcttcatacacgcggcatggctgcatcaggcttgcgcccattgtgcaatattccccactgctgcctcccgtaggagtctggaccgtgtctcagttccagtgtggctggtcatcctctcagaccagctagggatcgtcgccttggtgagccgttaccccaccaacaagctaatcccatctgggcacatccgatggcaagaggcccgaaggtccccctctttggtcttgcgacattatgcggtattagctaccgtttccagtagttatccccctccatcaggcagcttcccagacattactcacccgtccgccactcgtcagcgaagcagcaagctgcttcctgttaccgttcgacttgcatgtgttaggcctgccgccagcgttcaatctgagccatgatcaaactcttcaatttaaaagtttgatgctcaaagaattaaacttcgtaatgaattacgtgttcactcttgagacttggtattcatttttcgtcttgcgacgttaagaatccgtatcttcgagtgcccacacagattgtctgataaattgttaaagagcagtgccgcttcgctttttctcagcggcgcggggtgtgcataatacgccttcccgctacagagtcaagcatttctttgcttttctctgttgagattctcaggagaaccccgccgacccggcggcgtgtttgccgttgttccgtgtcagtggtggcgcattatagggagttattccggcctgacaagcgaaaaatataaaaactttatcgttcgctcacttttcaggcaaaacatcttaaatatagtcttttccgtctaacttatagacaaaaacgagccccgaagggctcgttttatcatttactggacggcgacaatccggtcttcattaacttccaggcgaatcactttacccggaaccaattcaccagacagtatttgctgtgccagcgggttttcgatctgctgctgaattgcacgtttcagaggacgtgcaccatagaccggatcgtaaccgttctcgctcagcagtttcagcgcctcgtcagaaatgtggatttcataaccacgttcttccagacgtttgtacagacgtttcaactgaatctgcgcaatcgaggcaatgtgctgttcacccagcggatggaagaccaccacttcatcgatacggttaatgaattccggacggaagttatggcttaccacaccgagcaccagctctttcatgtgcgcataatccagttcaccgaagcgttcctgaatcagatcggaaccgaggttagaggtcataatgacgaccgtattacggaagtcgaccgttctcccttgcccgtcagtcagacgcccatcatccagtacctgcaacagaatgttgaagacatccggatgcgctttttccacttcatccagcaggatgacggaatacggacgacgacgcaccgcttcggtcaggtagccaccttcttcataaccgacatatcccggaggcgcaccaaccaaacgagacaccgagtgtttctccataaactcggacatatcgatacggaccatcgcctcgtcgctatcaaacataaagttcgccagcgccttacaaagctctgttttccccacaccagttgggccgaggaacaggaatgaaccaatcgggcgatttggatccgccagccccgcacggctacgacgaatagcgttagataccgcatcaaccgcttcgttctgaccaattacgcgatggtgcagttcttgctccatacgcagcagtttttcgcgctcgctttccatcatgcgagaaaccggaatccccgtccaacgcgccagcacttcagcaatttcggcgtcggtcactttattacgcaacagacgcatagttttgccttcgagctgcgttgcggcttccagttgcttttccagttccgggattttgccgtattgcagttcagacatccgcgccaggtcccccacacggcgagcctgttcaatagcgattttcgcctgttccagttccgctttaatggtctgcgtaccagaaagcgatgccttctctgctttccactcttcttctaactcggagtactgacgttctttgtcgctcagttcttcgttgagcatatccagacgttttttactggcttcatcagactctttcattaacgcctgttgttccagtttgagctggatgatacgacgatcgagtcggtcgagttcttctggttttgagtcaatctgcatacgaatgctggatgctgcttcatcgatcaggtcgatggctttatccggcagctgacggtcagcaatgtagcgatgagacaacgtcgccgctgcaacaattgccgggtcagtaatttgcacatggtggtgcaattcgtaacgttctttcaggccacgcagaatcgcaatggtatcttcaacagaaggctcggcaacaaacactttctggaaacgacgttccagcgcagcatctttttcaatgtactggcgatattcgtcaagcgtcgtggcacctacgcagtgcaattcaccacgcgccagcgccggtttcagcatgtttccggcgtccattgcgccatcggctttacccgcgccgaccatggtatgtaattcgtcgataaataggatgacgttgccttcctgtttggcaagatcgttaagcacgccttttaaacgttcttcaaactcaccgcgatatttcgccccagccaccagcgcgcccatatccagcgccagtacccggcggcctttcaacccttccggcacttcgccgttgataatacgctgcgccagaccttcaacgatggcagttttaccgacgccgggttcaccaatcagtaccgggttatttttagtacgacgttgcagcacctgaatggtacggcgaatttcttcatcacgaccaatcaccggatcgagtttgccctgttcggctcgttcggtaaggtcgatggtatattttttcaaagcctgacgttggtcttcagcaccttgatcgttcacgctttcacctccacgcatttgttcaatcgcttgagtaatgttggcggtggtcgcccctgctgctttcaggatgtcggccagcgtgccgcgagactcaagtgccgccagaacgaacagttctgacgagataaagttatcaccacgtttttgcgccagcttgtcgcaaagattaagaacgcgcaccagatcctgtgatggctggacatcaccaccagtaccttcaacctgcggtaaacgatttaatgcctgattgatatctgtgcgcaactggccagcatttatgccagcggatgttaataaaggactaaccgaacccccttcctgattcagcagggcgctcattaaatgaagtggttcgataaattggttgtcgtgcccgagtgcaagtgattgggcatcggcaagagcaagctggaatttattagtaagacgatccagacgcataactcctcccataacggatcaaagttgctactggagattaaatgaggtcatccctcaattattcaaggttattgaccagattaatgtgaaaagaaaatcacgcgtaccggatcgtcttgattctttaggttatatcagccaaatgaaacttgccatacgaccggtggtcttgtcgcgacgataagagaagaaagtctcattttccgtatatgtacaacggtcgccgccgaaaatttgctcaacacccacgttcgccagacgctgccgggcaagctgataaatatccgccagatacttatcaccatgctgaatgaaagctgcacttgctttagcgtctactgccataaacgcctcgcgaacctccccccccacttcgaacgcgcgtggaccaattgccggccctaaccaggcgagaatattttccggattatcagcaaaacaggaaaccgtctcttccagcacgcctgcgcacagtccacgccagccagcatgagcggcggcgacttccgttcccgctcgattgcaaaacagcacagggaggcagtcggcagtcatcactgcgcaaaccgtgccgggcgtattgctataagaggcatccgcccgttttgaggcataaggttcgccagtgagcttaagcacatctttgccgtgtacctgctcaagccagaccggtttagaaggcaaattgcccgcagcaaaaagtcgcttgcgattctcctcaacgtgatccgggttatcgccacaatgggcaccgaggttgagtgagtcatacgggggcaagctcacgccgccgatacgagtggagctacaggccgcaacaccttttggctgcggccactgcgggacaatcagcttactcataaccagtccacttcatccttatgttcttcgaaatcggcgcgcatcacctcaatcagctccaccatatcttgtggaataggcgcatgccattccatttcgatgccggagatcgggtgataaagacgcagcatggttgcatgtagcgcctggcggtcaaacttacgcagcgtggagataaatgcttccgaagcaccttttggcggacgcggacggccaccataaaccggatcgcccaccagcggatgagtgatatgggccatatgcacgcggatctggtgcgtacgtccagtttccagacgcaaccgcagacgcgtgtgcacacggaagtgttccatgatgcgatagtgagtcaccgctggtttgcccatcggatgcaccgccatatgggtacgtttggtcgggtggcgactgattggctcgtccaccgtgccacctgcggtcatatgaccaatcgccaccgcttcatactcacgagtaatttcacgccgttgcaaagattcgactaaacgcgtctgagccggaacggtttttgccacaaccatcaggccagtggtgtctttatccagacgatggacgatgcccgcacgcggtacatcggcaatgggtggatagtaatgaagcaacgcattcagtaccgtgccatccgggttacccgcgccaggatgtaccaccaggtcgcgcggtttattaatgataataatgtcttcatcttcatagacgatatccagcgggatatcctgcggttcaaaacgcgcttcttcttcaatctcagcgttgatggcaacctgctcgccacccaatactttttctttcggcttatcacaaactttgccgttaaccagcactcgctggtcgaggatccattcttttattcgcgaacgtgaataatccgggaacatttcggccaaagcctgatctaagcgttgaccgagttggttttcggacaccgttgcagtgagctgtactcgttgtgccatatatactgcttcttcgtttatcgttggggttttacggctttgccgtttaatatagtgtgctattgtagctggtcttaaccgggagcaggaacagagaatctcccgtattacattttgaggaaagtcaaaacgtcatgacgcgcatgaaatatctggtggcagccgccacactaagcctgtttttggcgggttgctcggggtcaaaggaagaagtacctgataatccgccaaatgaaatttacgcgactgcacaacaaaagctgcaggacggtaactggagacaggcaataacgcaactggaagcgttagataatcgctatccgtttggtccgtattcgcagcaggtgcagctggatctcatctacgcctactataaaaacgccgatttgccgttagcacaggctgccatcgatcgttttattcgccttaacccgacccatccgaatatcgattatgtcatgtacatgcgtggcctgaccaatatggcgctggatgacagtgcgctgcaagggttctttggcgtcgatcgtagcgatcgcgatcctcaacatgcacgagctgcgtttagtgacttttccaaactggtgcgcggctatccgaacagtcagtacaccaccgatgccaccaaacgtctggtattcctgaaagatcgtctggcgaaatatgaatactccgtggccgagtactatacagaacgtggcgcatgggttgccgtcgttaaccgcgtagaaggcatgttgcgcgactacccggatacccaggctacgcgtgatgcgctgccgctgatggaaaatgcataccgtcagatgcagatgaatgcgcaagctgaaaaagtagcgaaaatcatcgccgcaaacagcagcaatacataacagaaacctgaaacacaaaacggcagcccttgagctgccgtttttttattctgtcagttgtgaaactgaagcgatttagtcgctatcgatctcatcaaatatggctcgctttgagatattcctcaagtaaaaaaacatctcttcctgcgatttctcacaaaaaagattcgttgacaaaaagtgacaaaattatgagattttcatcacacattttgacatcaggaacggtatgctgaattcaccaagacgggaagacaagaggtaaaatttatgacaatgaacattaccagcaaacaaatggaaattactccggccatccgccaacatgtcgcagaccgtctcgccaaactggaaaaatggcaaacacatctgattaatccacatatcattctgtccaaagagccacaagggtttgttgctgacgccacaatcaatacacctaacggcgttctggttgccagtggtaaacatgaagatatgtacaccgcaattaacgaattgatcaacaagctggaacggcagctcaataaactgcagcacaaaggcgaagcacgtcgtgccgcaacatcggtgaaagacgccaacttcgtcgaagaagttgaagaagagtagtcctttatattgagtgtatcgccaacgcgccttcgggcgcgttttttgttgacagcgtgaaaacagtacgggtactgtactaaagtcacttaaggaaacaaacatgaaacacataccgtttttcttcgcattcttttttaccttcccctgaatgggaggcgtttcgtcgtgtgaaacagaatgcgaagacgaacaataaggcctcccaaatcggggggccttttttattgataacaaaaaggcaacactatgacatcggaaaacccgttactggcgctgcgagagaaaatcagcgcgctggatgaaaaattattagcgttactggcagaacggcgcgaactggccgtcgaggtgggaaaagccaaactgctctcgcatcgcccggtacgtgatattgatcgtgaacgcgatttgctggaaagattaattacgctcggtaaagcgcaccatctggacgcccattacattactcgcctgttccagctcatcattgaagattccgtattaactcagcaggctttgctccaacaacatctcaataaaattaatccgcactcagcacgcatcgcttttctcggccccaaaggttcttattcccatcttgcggcgcgccagtatgctgcccgtcactttgagcaattcattgaaagtggctgcgccaaatttgccgatatttttaatcaggtggaaaccggccaggccgactatgccgtcgtaccgattgaaaataccagctccggtgccataaacgacgtttacgatctgctgcaacataccagcttgtcgattgttggcgagatgacgttaactatcgaccattgtttgttggtctccggcactactgatttatccaccatcaatacggtctacagccatccgcagccattccagcaatgcagcaaattccttaatcgttatccgcactggaagattgaatataccgaaagtacgtctgcggcaatggaaaaggttgcacaggcaaaatcaccgcatgttgctgcgttgggaagcgaagctggcggcactttgtacggtttgcaggtactggagcgtattgaagcaaatcagcgacaaaacttcacccgatttgtggtgttggcgcgtaaagccattaacgtgtctgatcaggttccggcgaaaaccacgttgttaatggcgaccgggcaacaagccggtgcgctggttgaagcgttgctggtactgcgcaaccacaatctgattatgacccgtctggaatcacgcccgattcacggtaatccatgggaagagatgttctatctggatattcaggccaatcttgaatcagcggaaatgcaaaaagcattgaaagagttaggggaaatcacccgttcaatgaaggtattgggctgttacccaagtgagaacgtagtgcctgttgatccaacctgatgaaaaggtgccggatgatgtgaatcatccggcactggattattactggcgattgtcattcgcctgacgcaataacacgcggctttcactctgaaaacgctgtgcgtaatcgccgaaccagtgctccaccttgcggaaactgtcaataaacgcctgcttatcgccctgctccagcaactcaatcgcctcgccgaaacgcttatagtaacgtttgattaacgccagattacgctctgacgacataatgatgtcggcataaagctgcggatcctgagcaaacagtcgcccgaccatcgccagctcaaggcggtaaatcggcgaagagagcgccagaagttgctcaagctgaacattttcttctgccaggtgcagcccgtaagcaaaagtagcaaagtggcgcagtgcctgaataaacgccatattctgatcgtgctcgacggcgctaatacgatgcagccgagcgccccagacctgaatttgctccagaaaccattggtatgcttccggtttacgtccatcacaccagaccacaacttgctttgccaggctaccgctgtccggaccgaacatcgggtgtagccccagcaccggaccatcatgcgccaccagcatggcctgtaatggcccatttttcactgatgccagatcgaccagaatacaatctttcggtaaaggcggtaatttgccaataacttgctcagtaacgtggattggcacactaacaatcaccattccggcatcggcaacaatatcagccgctcgatcccagtcatgttgctccagaatccgcacctgataacccgagagggtcagcatcttctcgaacaggcgtcccatctgaccgccaccgccgacgataaccaccggacgcagtgacggacaaagtgttttaaatcctttgtcgttttcactggagtaagattcacgcatcacccgacgcaaaacatcctcaatcagatctggcggtacacccagagcttccgcctctgcacgacgcgaggccaacatagatgcctcgcgctccggaacataaataggcagtccaaagcggcttttcacctcgcccacttcagcaaccagttccagacgcttcgctaataaattcagcagcgctttatcgacttcatcaatttgatcgcgtaatgcggtcaattcagcaaccataataaacctcttaagccacgcgagccgtcagctgcccgttcagatcctgatgaatttcacgcagcaaggcatcggtcatttcccagctaatgcaggcatcggttacggatacaccgtatttcatttcactgcgcggttgctcggaagactgattgccctcgtggatattactttcgatcatcagaccaataattgagcgattgccatctttgatttgagcaaccacggattctgccaccgcaggctgacggcgataatctttattggaattaccgtggctgcaatctaccatcagagacgggcgcagtcccgcctgttccatctctttttcacattgcgcaacatccgcagggctatagttcggcgctttaccaccgcgcaggatcacatggccgtccggattcccctgagtttgtagcaacgcaacctgccctgcctggttaatgccaacaaaacggtgcggctgggcggcggcgcgcatagcgttaattgctgttgccagactgccgtcggtgccgtttttaaaaccaaccggcatggaaagcccggaggccatttcacggtgagtttgcgattccgttgtacgagcaccaattgctgaccagctaaacagatcgcccaggtattgcgggctattcggatctaacgcttccgtcgccagtggcagtcccatattcaccagctcaagcagcaatttacgcgcgatctgcagcccggcttctacatcaaaagagccatccatatggggatcgttaattaaccctttccagccgacagtggtacggggtttttcaaaatagacgcgcattaccagatagaggctatcgctgacctctgcggcaagggctttaaatcgacgagcatattccagagcagtttccggatcatgaatggaacaaggaccacatactaccagcagacgaggatcgcgcccggcgataatatctgaaatgcttttacgcgagtcagcaatctgggcttcttgttgcaggctcaatggaaaagcggccttcagttgttccggagtcattaaaacctgttcgtcggtaatatgtacgttattcagcgcgtctttttgcatgatggcgatcctgtttatgctcgtttgcgatagttgatcctcagcgaggatgacgtaacgataacacataaagtaaagttttcaatccatatttcgtacatttttatttacacaggcaatttagtcgcgctttcaacccttacctctgtatagataaatttacactccctttgaaaacaatccgctatgctttgaaaaaggagaaagaaatgatgaaaaagtttatcgcccccttgttggctttactggttagcggatgtcagattgatccttatactcacgcgccaaccttgaccagcaccgactggtatgatgtcggtatggaagatgcgatatcgggcagcgccataaaagatgacgatgcatttagcgattcacaggcggatcgcggtctataccttaaaggatatgccgaaggacaaaagaaaacttgccagaccgattttacttatgcccgaggactttccggtaaaagctttcctgccagctgcaacaatgttgaaaatgccagccaactgcatgaagtatggcaaaaaggggctgatgaaaatgccagcacaatacgattaaattaattaaaaccccacaaataaattaaacataagattttactcattgtgttttatttctcacattgatgacggtcgcatgaaaaaatgatattttaatgagcattctgaaaaaatatcgatgcatttcgagcgaagatggtggggatccctgaatgcgtttttctcaccgactgttcttacttctgattctcctgctgacgggagcaccaatactcgctcaggagccttctgacgttgcgaaaaacgtgcgtatgatggtttccggtattgtcagttacacccgctggcctgcgctatcagggccaccaaagttatgtatcttttcatcttcacgttttagtaccgccctacaagagaatgccgcgacatctttgccttatctgcctgtcatcattcacactcaacaagaggcgatgatttcaggctgcaatggtttttattttggcaacgagtcaccgacattccagatggaattaaccgaacaatatccgtcaaaggcgttattattaattgccgaacaaaataccgagtgcattattggtagcgccttttgtctgatcatccacaataatgacgtcagatttgccgtaaacctggatgccttatcgcgtagcggtgtaaaggtcaacccggatgtcttaatgctcgcacggaagaaaaatgatggataacgataattctcttaataagcgccccacgtttaaaagagcattacgcaacatcagtatgaccagcatatttatcactatgatgctgatctggttgctgctttccgtgacctcggtgctgaccctgaaacagtacgcgcaaaaaaacctggcactgacagcagcaacaatgacttacagtctggaagcagctgtcgtttttgccgatggccctgcagcaactgaaacactggcagcgctgggccagcaagggcaattttcaactgcagaagtacgtgataagcagcaaaatattctggcatcctggcattacacccgtaaggatccaggcgatactttcagtaatttcataagccactggctcttccctgcccccatcattcagccgattcgtcacaatggtgaaaccattggcgaagtacgcttaaccgctcgcgacagttcaatcagccattttatctggttttcgctcgccgtactgaccggttgtattctgctggcatcaggcatcgcaattaccctcacccgccatttgcacaatggcctggtagaagcgctgaaaaatatcaccgatgtcgtacatgatgtgcgttccaaccgcaatttttcccgacgagtttcggaagaacgtatcgctgagtttcaccgcttcgctctcgacttcaacagtctgctggatgaaatggaagagtggcagcttcgtttacaggctaaaaatgcgcagcttctacgtaccgcgctacatgacccattaaccgggctggctaaccgcgcagcgtttcgtagcggcatcaacacgttgatgaacaattccgatgcccgaaaaacgtcggcgttactatttcttgatggcgataatttcaaatacatcaatgatacctggggtcatgcgacgggcgatagagtcttgattgaaatcgcaaaacggttagctgaatttggcgggctgcgacataaagcataccgcctgggcggcgatgaattcgctatggtgctctatgatgtacagtcggaatctgaagtgcagcagatatgttcagcactgacacaaatctttaatctcccgtttgatcttcataatggccatcagaccaccatgacattaagcattggttacgcgatgaccattgagcacgcctctgcggaaaaattacaagagcttgccgatcacaatatgtatcaggccaaacaccagcgtgccgaaaagctggtgagataacaaggatatatcgatatgataaagcacctggtagcacccctggttttcacctcactaatactgactggctgccagtcccctcagggaaagtttactcctgagcaagtcgccgctatgcaatcttatggatttactgaatccgccggcgactggtcgctgggcttatcagatgccattctgttcgcaaaaaatgactacaaattgctcccggaaagccagcaacagatccaaaccatggcagctaaattggcctcgacagggctaacacatgcccgtatggatggacacaccgataactatggtgaagacagttacaacgaaggcttatcattgaaacgggcgaatgtcgtggccgatgcatgggctatgggtggacaaattccacgcagcaatctcaccacacagggtttaggaaaaaaatatcccatagccagtaacaagaccgcccagggccgcgccgagaaccgccgcgtcgcagtggtgattactaccccttaaaacaccagcaaacagataaaaaagggccagccaattggccagcccttcttaacaggatgtcgcttaagcgaaatcttagttaagacgctctttgatacgagcagccttaccagtacgctcacgcaggtagtacagtttagctttacgaacagcaccacgacgtttgacagaaatgctgtcaactaccggagagtgagtctggaagacacgctcaacgccttcgccgttggaaattttacgaacagtgaatgcagagtgcagaccgcggttacgaatagcgataaccacgccctcgaatgcctgcagacgttttttggaaccttcaacaacccatactttcacttccacggtatcacccggacggaaggaaggtacgtcctgcttcatctgctcttgttcaagttgcttaataatgttgctcataatttaatctcttatcctgggtaaactgatatctcgggggcttacgccatcccatcatgtttatgttgctgttgtgcgtgttccgttttgaactccgccagcaaccttgcttgctcttcagtcagagccaggttttccagaagttcaggtcttctaagccaggtacggcccagcgactgtttcaaacgccagcgacgtatctcggcatggttgcccgacagtaacactggcggaacttccatcccttctaacacctcaggccgcgtatagtgcgggcaatccagcaatccttcagcaaaggaatcttccgttgccgaggcttcatgtcccagtactcccggaataaaccgggaaacggagtcaatcagcgtcattgctggtaactcaccaccactgagaacgtaatcgccgattgaccattcttcgtcaatttcggtttggatcacgcgctcatctataccttcgtagcgaccgcacaccagaatcaatttttgattcgttgccagttcgctgacgcccgcttgatcaagcttgcgtccctgtggtgacagataaatcacctttgcgccttcacccgccgcggcttttgctgcatgaatggcgtcccgcaagggttgcaccatcattaacatccccggtccgccgccgtaaggacgatcgtccacggtacggtgccggtcatgcgtgaagtcgcgaggactccagctctggatgctcagcaggccatttttaactgcccggccagttaccccgtaatcggtaattgcgcggaacatttcaggaaacaggctaattatgccaatccacatagcgccgtcttttaccgtttatccggtggtttaaaaaccaggatcccaatctacttcgattgaacgagtagtgagatcgactttcttgataacctgcccatcgaggaacggtacgagacgttccttgataccaaacgcatctttcaggtttgccttaatgacgagaacgtcattagatccggtttccatcatatcgacgactttaccgagatcgtagccttcagtggttactacctggcagcccatcaggtctttccagtagtagtccccctcttcaagctgaggcagctgcgatgaatccacgacaatttcacaattcgtcagcaggttcgccgcatcacgatcgtcaacgcctttcagcttgatgatcatgtcctgattgtggtgcttccagctttccagctggacttgctgccactgacccgccttctggataaaccagggctgatagtcaaaaatgctttcggcgtcttcggtggaagaaaacactctgagccacccacgaataccgtaagacgaacccatttttcccaaaacgatgggatcaacaggtgcttgcgcggtgagttgtttgctcatcatgaccaccgtgacagattaagctgctttgtttacttctttgatcagcgcagcaacgcgatcagaaatagttgcgccctggccaacccagtgagcgatgcgatccagatccaggcgagtgccttcttctttttcgctagcgattgggttgaagaaaccaacgcgctcgatgaagcgaccgttgcgtgcattacggctgtcagcgacaacaacctggtagaacggacgctttttagcgccgtgacgtgctaaacgaatagttaccataacatcctcttgtgtgaataaaacaaccggaccccatcgaggaacggagtccggtgtcatattaaaagcccgaaaattttactcatttttgcgggaattgcaatcaacagttgctaactctgctgtaaaaggccgtcggcggtgcagccagtttggtgccggagtgcgcgcagtcaccggagcgtacacgcagtacgtgaggatgacgagcacatcccggtgccaaaatggcaaacaagccaggccgattagcgaccagggaagcctgggggcatcatacccttcatgcttctcatcatcttcgccattccgcccttcttcattttcttcatcatgcgctgcatgtcgtcgaactgtttcagaagacggttaacgtcctgcacctgcataccgcaaccggcagcaatacggcgtttacgcgaacctttgatgatttctggcttagcgcgctctttcatcgtcatcgagttgatgatggcttccatacgcaccagcactttatcgtccatctgtgacttgacgttatccgggatctgccccatgcccggcagcttgcccatcagactagccatgccgcccatatttttcatctggcgcagctgctcaagaaagtcgttgagatcgaagccgtcaccttttttcagcttgctggctaatttctctgcctgcgcgcggtcaactttgctttcgatatcttcgatcagcgacagtacgtcgcccatgccgagaatacgcgacgcgatgcggtccggatggaacggctccagcgcctcagttttctcgccaacaccgaggaacttgatcggtttgccagtgatgtgacgaatagagagcgccgcaccgccgcgggcatcgccgtccactttggtcaacactacgccggtaagcggtaacgcttcattgaatgcttttgccgtattggccgcatcctgaccggtcatggcgtcaaccacaaacagggtttcaaccgggttaatcgacgcatggacttgtttgatctcgtccatcatcgcttcgtcaacgtgcagacgaccagcggtatccaccagcagcacgtcgtagaatttcagtttggcttctttcagcgccgcgttaacgatatctaccggcttctgaccaacatcagaagggaagaaatcaacgcccacctgctctgccagcgtctcaagctgtttgattgccgccgggcgataaacgtcggcagaaaccaccagcactttcttcttgtgcttctcgcgcaggaacttaccgagtttaccaacgctggttgttttaccggcaccttgcaggcccgccatcagtacgaccgcaggcggttgcgcagccaggttcagggtctggttctcttcgcccatcgccgcaaccagttcgttacggactattttgacgaactcctgccccggcgtcaggctcttattaacttcatgaccaaccgctttctcttttacgcgattgataaactcacgcactaccggcagagctacgtccgcctccagcagcgccatgcgcacttcgcgcagcgtatcttttacgttgtcttcagtgaggcgtccacggccactgatattgcgcagcgtgcgcgacaaacgatcggttaaattatcaaacattgtctctcgcctggggtggaaacggttggccgcaatcgcgacacatcatcagtattttgccgcagtataacatgaaggcgtctttgttgttatgcaacggttggagcagcgttcacctgacgctatactgcttctctttcttattgctcaaactgtcgacatcactatgcccgtttttgctctgctcgcgcttgtcgcctactccgtcagtcttgcgctgattgttcccggtctgctgcaaaaaaacggcggctggcggcgcatggctattatttctgcggtcattgcgctggtctgccacgcaatcgctctggaagcccgcatcctgcccgacggtgatagcggacaaaacctcagcctgctgaacgttggttcattggtcagtttgatgatctgtacggtaatgaccattgtggcttctcgcaatcgtggctggctgctgctacccattgtctatgcctttgcgcttatcaacctggcgctggcaaccttcatgcccaatgaatacatcacccatctggaagctacgcctgggatgctggtgcacattggcttatcgctcttttcctatgccacgctaattatcgccgccctgtacgcgctgcaactggcgtggattgattaccaactgaagaacaagaagctggcgtttaaccaggaaatgccgccattgatgagtatcgagcgtaaaatgttccacatcacgcagattggcgtggtgctgctaacgctcacgctttgcactggcctgttctacatgcacaacttatttagcatggaaaatatcgacaaggctgtgctctctatcgtggcgtggtttgtctatattgtgctgctgtggggacattatcatgaaggatggcgtggacgccgcgtcgtctggtttaacgttgcgggcgcggtaattctgacactggcctacttcggcagccgaattgtccagcagttaatcagctaaacccagaaaaggagtttcccctggaacacatttctactactacgttgatcattattctgatcatcatggtggtcatttcagcctatttttccgggtccgaaaccggaatgatgaccctcaaccgctatcgtctgcgacatatggcgaaacagggtaatcgctcggccaaacgcgtcgaaaaattgctgcgtaagccagaccgcctgataagcctggtgttaatcggcaataacctggtcaatattcttgcctccgcgctcggcactattgttgggatgcgtttgtacggcgatgcgggcgtggcaattgcgactggtgtgctgacttttgtcgtactggtatttgctgaggtattgccgaaaaccattgccgcgctgtacccggaaaaagtcgcttatccgagtagttttctgctggctccgctgcaaattttgatgatgccgctggtctggttgctgaatgctatcacccgtatgctgatgcgcatgatgggtatcaaaaccgatatcgtggttagcggctctttgagcaaagaagagttgcgcactatcgtgcacgaatcacgctcacaaatttcccgtcgcaatcaggatatgctgctgtcggtgctcgatctggaaaaaatgaccgttgatgacatcatggtgccgcgcagtgaaattatcggtattgatatcaacgatgactggaaatcgattctgcgccaactctcccactcacctcacgggcgcatcgtgctctaccgtgattcgctggacgacgccatcagtatgctgcgagtacgtgaagcctggcggttgatgtcggagaaaaaagagttcaccaaagaaaccatgctgcgcgccgcggacgagatctattttgtgccggaaggtacgccgctcagcacgcagttggtaaagtttcagcgcaacaaaaagaaagtcggcctggtcgtcaacgagtatggagacattcaggggctggtgacggttgaagatattctggaagagattgtcggcgatttcactacgtcgatgtcgccaacacttgccgaagaggtcacgccgcaaaacgacggttcggtgattatcgatggcaccgccaacgtgcgggaaatcaacaaagcctttaactggcatctaccggaagatgatgcccgcacggttaatggcgtcattcttgaggcactggaagagatccctgtcgcaggcacccgcgtgcgtattggcgagtacgatatcgatattctcgacgtacaggacaatatgattaagcaggtaaaagtttttcctgtgaaaccgctgcgcgagagtgtggcggagtaacgaaaacggcccggcattcgcatgcagggccgtgaattattacgaaagcagaaattaagcttttgctttcgctacagtaaccatcgccgcacgaatcgtacgaccattcagcgtataacccttctgcataatgcccagtacgttacctggcgcaacgtcatcagattccaccattgcgatggcctgatgcacattcgggtccagtgggacgttagtttcggcgatcacttcaacgccaaacttacgcacaacatccagcatcgacttcagcgtcagctcaatgccttcaaccatcgcagacatatccgggttagctttatcagccacttccagcgcacgatccaggctatcaatcaccggcagcaattcgttgatgaatttctccagcgcgaatttgtgggctttttcaatatccagttcagtacgacgacgcaggttttccatttcggcttttacacgcaaaatgccgtcacgttcacgggtctgggcttcagccagctgagcttcgagattcgcaactttttcatcgcgcggatccacctgctcagcagaagcttctggctcaactgcctcaatctcttcgtgctgatccatgataatttcttccggggcttgcccctcaggcgttttctgttctttactactcatgaatttctccgcgtttttttcgcattcatctcgctaacttcgcttattatggggatcagtttcagggtttcaagggaagcactcacattgtcatcaatcttcgcaacaaggacctcggaaaaatgaataatcatttcaagtgtattggcattgtgggacacccacggcaccccactgcactgacaacacatgaaatgctctaccgctggctgtgcacaaaaggttacgaggtcatcgttgagcaacaaatcgctcacgaactgcaactgaagaatgtgaaaactggcacgctcgcggagattgggcaactagctgatctcgcggtagtcgttggtggcgacggtaatatgctgggcgcggcacgcacactcgcccgttacgatattaaagttattggaatcaaccgtggcaacctgggtttcctgactgaccttgaccccgataacgcccagcaacagttagccgatgtgctggaaggccactacatcagcgagaaacgttttttgctggaagcgcaagtctgtcagcaagattgccagaaacgcatcagcaccgcgataaatgaagtggtgcttcatccaggcaaagtggcgcatatgattgagttcgaagtgtatatcgacgagatctttgcgttttctcagcgatctgatggactaattatttcgacgccaacaggctccaccgcctattccctctctgcaggcggtcctattctgaccccctctctggatgcgattaccctggtgcccatgttcccgcatacgttgtcagcacgaccactggtcataaacagcagcagcacgatccgtctgcgtttttcgcatcgccgtaacgacctggaaatcagttgcgacagccagatagcactgccgattcaggaaggtgaagatgtcctgattcgtcgctgtgattaccatctgaatctgattcatccgaaagattacagttatttcaacacattaagcaccaagctcggctggtcaaaaaaattattctaattttacgccagcctctttactgtatataaaaccagtttatactgtacacaataacagtaatggtttttcatacaggaaaacgactatgttggcacaactgaccatcagcaactttgctatcgttcgtgagcttgagattgattttcatagcggcatgaccgtaataactggcgagaccggcgcgggtaaatctattgcaatagatgccctcggtctttgtctcggtggtcgcgctgaagccgacatggtgcgtaccggcgctgctcgcgctgacctgtgcgcccgtttttctctgaaagatacgccagcggctctgcgctggctggaagaaaaccagcttgaagacgggcatgaatgtttgcttcgtcgcgtgatcagcagcgatggtcgctcccgtggtttcatcaacggtacagctgttcctctgtcacaactgcgcgaactgggtcagttgctgattcagatccatggtcagcacgctcatcaattactcaccaaacctgagcaccaaaaattcctgcttgatggctatgccaatgaaacctctctactgcaggaaatgaccgcacgttatcagttgtggcatcaaagctgccgtgacctcgcgcatcatcaacagttaagtcaggaacgcgccgcccgtgcggaactgctgcaataccaattaaaagaacttaacgaatttaatccgcagcccggagagtttgaacaaatcgacgaagagtacaaacgtctggcgaacagcggtcaattgctgaccaccagccagaatgcattggcattaatggccgacggtgaagacgcaaacctgcaaagtcagctttacacggctaaacaactggtgagcgaattgattggcatggacagcaaactgtccggcgtacttgatatgctggaagaagctaccatccagattgctgaagccagcgatgaactgcgccactactgcgatcgtctggatctcgatcccaaccgactatttgaacttgaacagcgcatctcaaaacagatttcgctggcacgtaaacatcacgtcagccctgaggcattgccacagtattaccagtcgctactggaagaacagcagcaactggacgatcaggccgactcacaagaaacgcttgcgctggcggtaacgaaacatcatcagcaggcactggaaatcgcgcgcgcattacaccaacaacgccagcaatatgcagaagaacttgcacagctgatcaccgacagtatgcatgcgctctcaatgccgcatgggcagtttacgatcgatgttaaatttgacgagcatcacctgggcgctgacggtgccgatcgtattgagtttcgggtaaccaccaacccaggtcagccaatgcagcctattgccaaagtcgcatccggtggtgaattgtcccgcatcgcactggcaatccaggtcatcacggcgcgtaaaatggaaaccccggcactgatttttgatgaagtggatgtagggattagcggtccaacagcggcagttgtcggcaaactgctgcgtcaactcggcgaatcaactcaggtgatgtgtgttacccacctgccacaagtcgcgggatgtggtcatcaacactattttgtcagcaaagaaaccgatggtgcgatgacagaaacgcatatgcaatccctgaataaaaaagcgcggttacaagagctggcgcgcctgcttggtggcagtgaagtcacacgtaatacactggcgaatgcgaaagaactgcttgcagcgtaaacttttttcctgcttcacggtcagagtaaacagcaaaacgccgtaagaccggaaagcaaaaggttttaaagtgatgaaaggtctattatcatcggcatattacagatgagccacgtactgctcgggcccgaaaaggaatcaaatcactatgcgctgtaaaacgctgactgctgcagcagcagtactattgatgttgaccgcaggctgttccactctggagcgagtggtttaccgtcctgacatcaaccaggggaactatctgaccgctaacgacgtatccaaaatacgtgttggcatgacgcaacaacaagttgcgtacgcattgggtacaccgctgatgtccgatccatttggtacgaatacctggttctatgtcttccgccagcaaccaggtcatgaaggtgtaactcagcaaacgctgacgctgacctttaacagtagcggtgtgttgaccaatattgataacaaacctgcgctgagtggtaactaataataaagttgctctcaaagacgttaaaaaaggtgctcaatgagcaccttttttctgtctgttatttattcgctgatttttctgctcgttgcctgcgaagctctttcggatcggcaatgagagggcgataaatctccacccgatcgccatcatgcacactatcgcttagttttgccggacggctgtaaatgccgactttgtttttagttaaatcgatatcggtacgcaattccagcaagccactggcgcgaatagcttcttcaaccgtcgcgccctcctgcagcgtcactcgctgcaggtactgcttctcaggtagcgcataagccacctcaacggcaattttacctggcactgtaaacctctttcgcacgaaccgtaaaagcctggaccatattagccgccagctctttaaacacgcgaccaaaggcgagttcaatcaacttattggtaaactcaaagtcgagatgaaactcgatacgacacgcctcctggctcagcggcgtaaacttccatccaccaatcaatttcttgaacggcccatccaccagattcataagaatactttggttactggtcaactggttgcgggtagtaaacgttttgctgatcccagccttagagacatctaccgccgcagtcatctgcccaggagtggactccagaatccgacttccggtacaacccggcaaaaactgaggataagactgaacgtcattcactaactgatacatttgctccgcgctgtagggtaccagtgcggtccggctaatctgaggcataacaatttccatcaacaaaaatccaacaaataatatcatttatcctgctgtaaaaaaaacgctatcccggcgctgggtaacatcgggttcatgctaagatagagccttgtcccccgcaggattgatatggggtgttttcgatttcagattaccgatgattcacgacgcttatgacgaagaaaaaagcacataaacctggttcagcgaccatcgcgcttaacaagcgcgcccgtcacgaatactttatcgaagaagagttcgaagcgggacttgccctgcaaggctgggaagttaaatccctgcgcgcaggaaaagccaatatcagcgacagctacgtccttctgcgtgacggagaggcatttctgtttggcgctaacatcacgccaatggccgtggcctccacgcatgtggtgtgcgatcctacccgtacccgcaagttacttctcaaccagcgcgaactggactcattgtacggtcgcgtcaatcgagaaggctataccgtagtggcgctctccctgtactggaaaaatgcctggtgcaaagtgaaaatcggcgtcgccaaaggtaagaaacagcacgataaacgttcagatatcaaagagcgcgaatggcaggtggataaagcacgtatcatgaaaaacgcccaccgttaaacctgcactccaattattgaccagttcctcaccgcgcctccctctccggcggcgcgaatgaacatcttattggctatcacatccgacacaaatgttgccatcccattgcttaatcgaataaaaatcaggctacatgggtgctaaatctttaacgataacgccattgaggctggtcatggcgctcataaatctggtatacttacctttacacattggggctgattctggattcgacgggatttgcgaaacccaaggtgcatgccgaggggcggttggcctcgtaaaaagccgcaaaaaatagtcgcaaacgacgaaaactacgctttagcagcttaataacctgcttagagccctctctccctagcctccgctcttaggacggggatcaagagaggtcaaacccaaaagagatcgcgtggaagccctgcctggggttgaagcgttaaaacttaatcaggctagtttgttagtggcgtgtccgtccgcagctggcaagcgaatgtaaagactgactaagcatgtagtaccgaggatgtaggaatttcggacgcgggttcaactcccgccagctccaccaaaattctccatcggtgattaccagagtcatccgatgaagtcctaagagcccgcacggcgcaagccctgcgggcttttttgtgccctcaatttgtcccgcgaagtccgaagagaactaattaaatccgaaccttttaggcccattgataggcccaacgaaaagctctattgtttacgttgggcctaaacgcagggagactccccatggcaagaaaaaccaagccgttaactgatacggaaatcaaagccgccaaacctaaagatgccgattaccagctttatgacggtgacgggcttactctgttaatcaagtccagtggcagtaagctttggcaattccgttactatcggcctttgaccaagcagcgaaccaaacagagcttcggtgcctatcctgccgtctcgctttctgatgcacgtaaactcagagccgaatctaaagttttattggcgaaagacattgatcctcaggaacatcagaaagaacaggtgaggaattctcaagaggccaaaaccaataccttcttgttagttgccgagcgttggtggaatgtgaagaaaaccagcgtaacagaggactatgccgacgatatctggcgctcgcttgagagagatattttcccggcaatcggtgatatcagtatcactgagattaaggctcatactctggttaaagcagttcagccggttcaggccagaggtgcattagagactgttcgccgcctttgtcagcgtattaacgaagtcatgatttatgcgcagaacacaggcctgattgatgctgttcctagtgtaaatatcggaaaagctttcgagaaaccgcaaaagaaaaacatgccaagcatccggccggatcaacttccgcagctaatgcacaccatgcgtacggcaagtatcagcatgtccacaagatgcctgttcatgtggcaacttctaaccatcacccgccctgccgaagctgctgaggctcgatgggatgagatcgatttcaatgctagcgaatggaaaattcctgcagctcgaatgaagatgaaccgggaccatacggttccactatctgatggggctcttgctattctggaaatgatgaagcctctcagtggtggccgagaatttatctttcctagccgtatcaagcccaaccaaccaatgaatagccaaacagtgaatgcagcactcaagcgtgctggcttaggaggtgtacttgtttcacacggcttgcgttctatcgccagtacggcactcaatgaggaaggatttccacctgatgtcattgaagcagcgcttgctcatgtagacaaaaatgaggtgcgtcgcgcttataaccgcagtgattatcttgagcaacgtcgtccgatgatgcaatggtgggctgatctcgtaaaagcagcagatagtggtagcatcgttttaactcatttgagcaaaattcgtcttgtcggataaaatatttatcagcccagctctctgggctgatatttctaaaagatcgcactaaatagctacgcggaatagtgctctactttcgtttagccctttcagaggtaagacattagggcaatttcactgtatgactgcgcagtcatcgagtctgtggggtgttgctccttttgcaacgtatcacttgtcaataaatagaaagtgtagatgtattaggcgcagctatttagtctatatggcaagtagtaattatttacttcttttttttctacgaacagcgctatcgaaagcttgttttacatcttcattttttaaagaccattgatttaaaatagtatcaaccaaagcatcttgactcattgttgctacacgatattttttattttgattatttatctcaaactctgacatttgaataaaatcccatagcggttcgataagttcattaactgctacaaccttatttttccacccatcattcggaacagagtcattaattagctcaaccaacttcagttgaatgatatggtacacttccgctttgcttttgccacccttctttcctgcactccgcctgacttctgataattttttttgattacaaacagagatgttaaaccaagtcatacctatgcacttatcaaataactccgcagcccgatgaaatgctttaaaggcaacgttttcattttcagacatgatagattttccccagaaaaaagagattgaggcgaacataaggtgtgccttgaaaatgtcattaatggaaaatggctcgataacaagaggtaaaaacgtttccttggtaaggtttgaacttagatttttccagcattcttgagctggatcatataattcagtgtattcttcctttatctccagttgcccattcactgtatggtgccttgtttcccatggtacatcgcaggaatataacctcacacgagtacctattttctcagagctccagaattgctctcgcattctgcctagctcaatccgtatttccggatgatcttcctctagaacatcagtatccaccgcccattcgcattcggacatgtgataggcgagatcacgtcgttttctacaaatttgttcataaaaatcattcagagaaatcataaaaccaccataaatcaatgtattagaggttgtaaaaattgtatttttggtacatgggttttttgccttaaagatacccattaatctctctgcaaccaaagtgaaccaatgagaggcaacaagaatgaacaatcgatcggccgttagaatactacggttaccagcggttatccaaaaaacaggtatggcacgggccaccatctatgactggttgaaccccaaatcaccacgatacgatgccacctttcccaaaaagcgaatgctcggcgtgaaatctgtcggatggattgaggccgagattgatgagtggttatcacaacgctgtaaacttatttgagggtgttacatgaattcatactcaattgctgtcatcggagtgtaaacatcctgctatttccgccattaatagcggaatagccatatttgctaaacaatttcttaatttaattaaataagaggcattgcatgttcaatggtcgtcctttccctgtagatgcatttcctaaaattatcaggaatgcaatttatgaagtggaacagcatacgcaggcccctcaaggtttgattgctgcttctgctcttggggtaatttctcttgcctgtcagaaccggattgatgtttgccgattgaataatctacgtggcccggtatcacttttcttaatgactctggctgaatcaggtgaacgtaagagtacggttgataaactgctgatgaagccattatatcaactggaagaggatttatttgaaaaatacacccacgatcttaccgcatggagaaatgatgaagcaatttttaatattgaaaaaaaagcactgatgtcaaaacttaaatcagatattcgacgtaacaaagatcacttggcaacaaatgaaagacttaaagaactacttacgacaaacccgaaagctccagtgagattcaaatttttatttaacgatgccacacctgcagctattaaagctcatctctgtgggcactggcgatcagtcggcatcatgtctgatgaagctgggatcatttttaatggttacacacttaacgagctgccgtttatcaataagatgtgggatggttcaatatttacggtggaaaggaaaaacgagcccgagaaattaattagagatgcaagaataacactgtcgctgatggtccagcctaatgtttttaagggttatatcgacaggaaaggagatatggcaaaggggattggattttttgcacggtgcctcatgtgccagcctgcttcaacacaaggtaacagaaaaatttccaacccaattttttcaaatgaacatttgccggtatttcaccaacgtcttatggaaattgttaatgagagcatcattaaaattaatgaaaataatcgcatctgcctccgattctctgcagaagcagaaagacattggatcgaattctacaaccaggtcgagtcagaaatgagaatgattggccttctttatgattttaaggattatgcttctaaaatggcggagaacatggcgaggcttgctgccttacttcattacttcagcggtgatggaggcgatatatctgttaccgcagtaaaagcagcagtggagatagtggcttggtatattgaagaatacatccgcttgttctctaaaaaagaagagttttctttagatgtttcagaagcagatgagctttattgttggataaaagattactgcacgcaaaaattttcttcctgcatcaagaaaaatattatcttacaatttgggccaaataaatttagaaatcgtgacaaggcaaatgaattaattagaatcttaatttcacaaaacaaaatatttatatcttcatggggtaaaacaaaaataataaacataactcattgtgttttttgattttaatgacaatctaaaaggacttaatttaagagtaaaaacaaactctaaacccagttcggataaaagcttgtcatcttgataggtaatatataggtacatagacacatcagaacgatcacttactccaatatcattggccaggatactatatgacatacgatagtgaattcggatcacatgtatccctatatcgggatagaatcaaacaggttattgatgactccctaaacgaacatcttaactcaatgattctacgtgttgatctgcatgacccaattgatacagaaaatatggataacccattctttcaacccagggttgactctggtgctatatctcgctttaccagtgcgttaaaagcaaagcttaaacatgataagcatattaaaactcaacggaaagactggcctgatagtcgacattccactttacgttacgcatgggtcagagaatataccaaaaatagaaagcggcattaccatttgatactgtgtttcaatcaggatgcttattatcatttaggtgattacgacttaaaccgtaacacgttacgtacaatgataacgacagcttggtacagtgcacttggcatccctatagatagctcggggaagttagttaattacccgccaaatggcaaataccttctcaatcgtaaaagggacaactttgagcagacttatagcgatttgatgaatagggtggattacatgaccaaagtaaggactaaaatagtcggtgacggagaccgtaatttcggctgcagtcgcgggtaatttattttttacaacaatggcctttcttatggctggaaaggcctgatttgtttgtattaagatatcggtaatcttttgatggttggaagcccgtcctggtagacgacctagcctaccgaagatgtgagttattcaaaaatgtcgctttcccgcgttccgtagacaaacgtacctaaatcaatgtcgtctaataccgagcgcgcgcctgataaacatctgatcaacgtacccaatcgatctactccaaatgtcctgagtatcccgaagatactggctcaactcatccacatcagcctcgtcggaaaattccagcaagtctaccagtcggtgtaacgtctgaatgggaatgccaatctcttctaaggcattgacacctggtggtagatggaaactttcgaacgccaatttgacatgtgtgtaatcgactttgctgcgtataccacgctttacagcgtggtgtttaactacatcctccatcaagctgagcaccttaggtagggtatagccgaaggtattggttatgagcttcaaatcattgttgagggcaatggaaagagtacgtttctccccttcagaaatccactgtcgtgcataatcgatctgatttttcagatattccgaataactttcagcacttaaatagccggcaagttttgcgatcatgacatccgtaggcttaacagggaccccattgcgactgaacgtatggggaaccagtctggcaatgatctttgcaaaggtcttgaggaagtttgtcgcgggagtccagtgaaacactaacgaggaaaattcgttatcgtccatcatctcgaacatgctttgcagcatttcgaactgctcgacacggaagtacgaatgcttcttcacaaggtcgatggaaacacggtcgtttatgaaaacctcatcaaagcgatcctgtgaaaactcggacaagtggtctggttgaacgctggctaacaggttgattggggtatcaatgccctgaataccgagcggaatatccacctcttgattgagattgtcttccgggatttcctccaggcaaaagattttgccgacgaagtgaacgcccatgcgcccggcgcgacctttgatgttcccatgggtgaatttgtcaatgctgcgagttccatcgcggttgtcgtagatcacaacgttcttagcgatagtgttgactccttcaatgatcgtggaggtgcagagcaaaaagcgcagttttccagcattgaattggtcggcagtgtattgctgcagtgccctcggtagcgcgccaaaatgcaagccaataccgtttctaagggcgactgtgtaatcccagtcggcatcgaactcttcgctgacccagtcgacatggggattctcagtcggagtgccatgcccaagcctgatcagctcgcgcgccaccaggcccgcaacagttggtgacttgcaataaatgatcgttgcgtcgacacatgcgtgcgcgatttcccccagcgctttgagcttggctttgtcgtcattcgctttgatgccgaacgtcttaacatctagcgcgactgtattgaagtcggtagaaacgaaagtatgcggatatccaagtttttcgagaccgcgaatgctgttaacgaacggtcccgtcaggtaaaactgcctggagaccttaagcagtttgcttaacgcaatgttgagctcgatgactcgttcgtcttgatgatcaatgtccccgcttttcagttgtcggaacgccaacttgtaaaactcgtcaatgacgaagaggtcaatgtcgacgatgtcgtcacgctcgttcactcgctcctgagttaacacataaacagcctgatcggaatggcacacttgggaactgtggtggatgatctgatatcggtcaccgaatcgctcttgcagtcggcgacgggtttcgtcggcaagagccacggttggaacaaccagaacaagccgtttcaaagttcccatgccgagcaatgaatcgacgattgcacttttgcccatgcttgtaggtgcactcagcaccacgttttgaccagacttgagcagatcgaatatgtggaactgcattgagtggaaaacataaccatccgagaatggcgtccggtatagctcaagcaccctcaggtcatccggtgtcaggctggtgaactcctttttgagatacgggaacaaacctgattttctcaccatatttttcaaaattgtggtgtgctcggaaaaccgctcgcgcgaatcgagagctcgcacgatcaagtcccgtcccaagtcatacgaaacagggttagacaacagcttgttaaccgcaaacagataattgaacgatgagaagtcctcaccctgcaggctatgtttcgcctgttcatagatctctgtcatacgacctctctcaccttctcatcaactaattgggttaaccgctcaagactcggggctggataaatgaatacgtggatgcaaagattcgcaaacggcgaatcctcgatgaggtcagccgcgaatttttcgaacagcaccgctgtttctttctccaggtcatcctcgaaccccggcgtttcaggctcggttagtagattagagtcgtagcccacgaacagaacaaacgtgaaacgatcgaggtgagcatcgaaaggttggctgccatcaagaatttcgtcaatgtcgtggcgaagcaggtagttatcgtctttaatgtcgaggatttttttgcgcgcggtatcgatgcaatccgaaatgtcctcgtacaactgatcccgtatctccggcaatctgacggcaatgttaatatcagtcaccaactcgctgaagccaatccaaagctgatcaccttctggatcgcggcgaacgatatgcacgttttcaagaattttttcggcccctgctttttccacgtatagcatgcaaggaataggctggctttcgtggtgctgccggatcgttgcgtgcaacagcactcgacccaaaaattcgctgacgtcatggagcgatttgaagacggaattctttagtcgttctcgcttttcaatgaatgtcagtttatgaatatcagacatttcttttggtcggagaaaaacctcatccaaccattgacagacgttatccgcgatgtgcttgtagcggtatttcttaagtgagtactgctgatgtagaacctggcctttacgcttagcgcagaccgaagccataggcgctctaaatggcgtaaggatgtggggtaagtcccgtttgacgtagattttgcggcctgaccgagattggtcatcttcgacacgctgcttgaaccactcaagtaggtctggtcgtaagtaggacttgtcatcagcactgtgaatgcgtcgagaatgctcgcccttgcgcgtcacagtatcaaggatgcggcaccaaatgtcttcggcgacggtttcggaactgagaatgaccccatgtagatcttgggaggccagccgtatgttcttgatccctagaagttccagttcgcgcagggatgaaaacacttcccatgtagccgcatcgatccaatctgaaacgcttatacctgagtctgttaaaaaattgtctgtgcgtttgttgaggtcatcgatgagttcctgtcgacctggcttatctagtcgggcgtttgggctgatcgtcaagtactcaagggttttgttgaccttttcctctgtgacgatggagtacctacgtccaagggacaggtcagactcacactgcattgatttgtgcaaaattgaactgcaggggatcgtctttttatcagcaccttttgaattctgaacgatgtccgaaatgttccaacgtgttttgccggtgctttttacctgaacgaagtcgatgtatccatcagatacaatgtcgatatcgtctgtgacctcgcagcgcacactgcggatagtcttgtcacgaagcattcgggtgacatggtaagcggctacgcagtcctgaaataagaaaccgtgcttggcggctactccgcctgaatcgttcgactccatttagacatccgtgacaattttgcgaaaattaaggagatgttatgacacagtccaatcggatcactgcatcatcaccagtgatctaaatacttcacagccattctcggtcgcaggtatcaagcttttcaggattccacaaatattgtaaccctgacgtctaatttggttatataacatactgccccaactaacgtaaggtaggcacagccttaatcaaggttttggttttcaaatagttcagagctgagaccgccaaccgcactatggcactatggcactatggcactatggcactatggcactatggcaccgccagcgattgtaatcacacttgatattataaaacacagttgcacgcattatttcctggttggtagggtcatatctcgatgctctttgagcaatgtcaacatcgcgtgttcatggctttctatattgttgatgccttgcccatccggaccccactccttatagctcatcatgatggcttgttttgggctctctgctcgttctgtttcgacgtagaattttttcttgtctgctggcgaataattactaagtatcgagttgctgcttggtgagatcaggaagaggttaccgaaacgatggacatcatcccccattttgtggactgcccccccggtagacgatcctgccctatagttggagtgccccctattcaggtggctaaatttagcaaatcaatacacttcaggggggtattattgtagagtttccccatatgtttctatgggatccaggaaatgacaatcaggagttacaaaaacttaaatctggtcagggcaaatatcgagactgaatccagacaattcattgaaaataaaaactattcaatccaatcaattggtcctatgccagggtcaagggctgggcttcgggtcgtatttaccagaccaggggttaacttggcaactgtggacattttttataacggggacggttcgactacaattcaatatctcactggagccaatcgttctctgggccaagagttagcggatcatctttttgaaaccatcaatcctgctgaatttgagcaggtaaatatggtactgcaaggatttgtagagacaagcgttctacctgtacttgagctatcagcagatgaatcgcatatagagttcagagaacactctcgtaacgctcataccgtagtgtggaaaattatttccaccagctatcaggacgaattgactgtgagcctgcatatcacaacaggtaagctccagattcagggccgaccgctgtcatgttacagagttttcacgtttaacttggcagccctgcttgatttacagggtttggagaaagtgctaatccgccaggaggatggtaaagctaatattgttcaacaggaggttgcccgcacttacttgcagactgtaatggccgatgcttacccgcatctccacgtgactgccgaaaaattgctcgtttcagggctatgtgttaaactcgccgcccctgatttgcctgactactgtatgttactttatcctgaactacgcaccattgaaggtgtcttaaaaagtaagatgagtgggttaggcatgccagtacagcagccggcaggttttggaacttactttgataaacctgctgctcattacattctgaaaccgcaatttgcagctactcttagaccggaacagattaacatcatcagcacagcctatactttttttaatgtggaacgtcattctctgttccacatggaaactgtggtcgatgccagccgtatgatttctgatatggcccggttgatgggtaaagccactagagcgtggggaataatcaaggacttatatattgtttgaaatcaccggaattaacgtctcaggggctctaaaagctgtcgttatggcgaccggcttcgagaaccctttgtcctcagttaatgaaattgagacgaaactttctgccctactgggtagtgagaccactggtgaaatcctttttgacctcttgtgcgctaacggtccagagtggaaccgcttcgttacgctggaaatgaaatatggccggatcatgctggatacggccaaaattattgatgagcaggacgttccgacacatatcctgagcaaactgacttttactttacgtaatcatcctgagtacctagaagcctctgttttgtctcccgatgatgtacgccaagtcctgtcaatggatttttgaaactcttctttctaaacgaaccagtatagaattcgcccttttggcatgatattaacttgtccaatatgatcaaatagcattaaccccccctcacaacgtcctgcatagggaacacgttttcccctgtgcacccacgactaaatttccccccctttaaacttctcaataatgtcaccaattttctggaaatcctatgatgcctttcccggtaaatggtgctgtgagttcagaaagattctgcaatctatgtgcattgaaaaaatcttcagatagatatcattctcctgaacaatccgatgaacggcagaacctcgcggttctgccgtttttgttttacttttcagaggagtggtgatgaaaaattttgaagttctgcagccactacagaactccctttccggtctaccgctatgggtatctgaacgtatattgcagcagataaatcagttaacccactacgagccagtgatcggcatcatgggtaaaactggggcgggaaagagtagcctttgcaatgccctgtttgccggtgaagtatcgccggtcagcgatgtagcggcctgtacacgtgatcctttacgctttcgcctgcagattggagaacactttatgaccatcgtggatctgcccggcgtgggcgaaagtggcgttcgcgataccgagtatgctgcgctgtaccgcgaacaacttccccggctcgacctgattctgtggctgattaaggctgatgatcgggcactggcgactgatgagcatttttaccgtcaggtgattggcgaagcataccggcataagatgctgtttgttatcagccagtcagacaaagctgaacccaccagcggtggaaatatcctttccacagagcagaaacaaaatatcagccgcaaaatctgcctgctgcatgagctattccagcccgtgcatccggtgtgtgccgtgtcggttcgcctgcagtggggactaagggtgatggcagagcggatgattaagtgtctgccgcgtgaggccagcagcccggtagtagcgctactgcaacatccctttcgaacaacggtagcccgggagcaggcacgtgacgatttcggtgaaaccgtaggtgccatactcgatacggtaagcacctttccccttattcccgccccggtgcggaccattattcaggccgtgcgttcctcggtggtgtcagtggcccgcgctgtctgggatttcttcttctgagtgtttaattctgccctattattctccgagccctgtcgcaagtgcggcagggctttctttatttgttttacccatactgaggagtctgcttatgacccgtctggcttcgcgctttggcgctgcaaatcttattcgccgtgaccgtccgttaacccgtgaagagttatttcgcgtggtgcccagcgtattcagtgaggataaacacgaatcccgcagtgaacgctacacgtatatacccacaatttccctgctggacagcctgcagcgggaaggcttccagccattctttgcctgtcagacacgggtacgtgacccccgtcgtcgtgagcatactaagcatatgctgcgcctacgtcgggaggggcaaattaccggtaaacaggttccggaaattatcctgcttaactctcacgatggcaccagttcgtaccagatgctgccgggcatgttcagggcggtgtgccagaacggtctggtctgcggcgagtcgtttggcgaggtgcgggtgccacacaagggggatgtggtgagtcaggttattgagggggcgtatgaagtgctggggatttttgagcgtgtggaagaaaagagggatgccatgcagtcgttgcttttaccgccacctgtgcagcaggcactggcaaaagcagcgcttacgtatcgctttggtgaggaccaccagccggttactgaatcgcagatactctccccacgccgctggcaggatgagagcaatgacctttggaccacctatcagcggattcaagaaaacctgattaagggcggactcagtgggcgtaatgctaaaggcggacgaactcatactcgtgccgtgcgtggcattgacggggatgtgaagcttaaccgtgcgctgtgggtgatggcagaaacactgctcacgcaactgcagtagacgtttcatgttgccacgttgttaatatcggacaccacctgtccgcatcgctatgtgctcgtgtgcctcaatcccccggttatagcttttaacccccgttacatctggcttttgcagaaataaaaaatagtttctgcgttgtccataccctgtccgcccccctctttaaagtaatcacatcattttcagtcagttaactttcctggagaatctctcatgacacaggcagaacgccgccatgaccggctggctgtcaggctgtcactgataatcagccgtctggttgcgggtgaaacgttgagcgtgcgcaaactggcggctgagtttggcgtgtcagtgcgcacgctgcggcgtgattttcgtgaacgactgatgtatctggacctggagtatcagtccggatactgccgcttacgcactgctggcagtgagatgcagatggtgcccgacgtgcttatctttgcccaccgcagcgggctggccgggctttttcccggccttgaccgccgtctggtgaatgcactgctgatgtgcgatgagtctccctgcgtgatagcaccagccaatccggttccttcgccttcaggagcattgtctttctggagactgattcaggccattaccgggcgcaggcgggtgacgctgattgcagaggggcgacgctgtgagcgcctagctccctgccggttactcatccaccagcagacctggtatctggtggctgaacacgaagggcatatcgccgtattcacacttgatgaaatccatctgattcagcctttgcaggagacttttcgccgcaatgacagtctgtgtcgcctggttgaagacccggtcttcattcaggccttaccccattttcgctttatccagcattcactgcttacgtttgttccggccgacagcccaccggaatagcgcaggcgttgttatcaacccggcaacatggaggagcccagtgcccgttattgccattatcgccattgttatcatcgtcatcattctgaacaaaaccggagtgtccgacagcctcacggccctgacacttgcaaccgttgccgcactactgacgggaggtggtgcagccggtgctgccagtgtcgcgctgacgccgttcgtcggcgtgccggtgggtatttttgtgggaatttatgtctttgccaaagtggttcgtctgatttcagggaaaaaataatgaaacgtaaaacactacctctgctggcgctggttgccacctctctgtttctgagcgcctgcgatgacaggagtgatgacctcaaagctatcagtaaatttaaggacctcacgcccccgcgcttcagcgatgtggtcagccgtcaggatgatgtcagcgaagaatggtcacaggttggcttctcatccggtctcaccctgcaggtcttacgtacccgtgagtcgcccgatggttgcgagggtggcagttactactatctggtagatatggaggagaaaaccgtccagccgctgatgaatgcgctttgtattgccgacaatatcaaactggaataccacgaagttacggacccgtatacgaaagaaaaatacttcgaatattcccatgacggcaaactgatgggacggctgctgataccgtcaaaccctgataaccgggaataaaaacaacgagaaaggagacataaatgaaaatacgttcactaagccggtttgtactggcaagtacaatgttcgccagctttacagcctctgcggtccccggactctggcaacaggggtacggtcagggcaatgcggaatacagtgtgacggatgccagcggaaagatgtttaccatcaactgcacgggaaatccggaccagaacggtatttaccagcactcggtttttctgatcctcgccggggataaaacggtcagctcgcatgatgacagtaccggcatcacagtggtgatggaccataagcaatatgccattccctcaacccttggctggcgtaacggagataatgcctggttcagcttcatcatggatatccgtaaggcccggcagttcgacgtctacgtcaatgaccagaaagttggatcgtttaaccctgatgttcggaatgcacaaaaggtcctgccaacattagcggactgcactaacgactgacggctgcgccttccctaccataacaaccctgattgcctccggcggtcgggggtttcttttttctccttaatctccagaggtaggccacgtactttcgaacgatgagcgcagtggtcagtttttttcagatatatttatctttttttggctgtaagctccgctgtgagcgcaggctgtgttaaaactcctgatcactttttggtctaagcgatggtttcatatgatcaaccattcttgataaacccatgagacggactaactttttcattaaaattaaaaagatatgaatgaatactgcggatatcaacatggccaatcacattcaaggacaaggcaggcatcaggtgacattgctccctgatgcactcgatgattttgtcactgaagatatctgaaataagtttaatcagttcatcacgggtcggtggcatatcgagataattaattattgtcggttcgttgccgttgttatgaagcatctccagcgtgttgcgtgaggtgccacaggccgggttgtgatagatggtaatgttgctcatatcagtatctaattacaaagtgacagagagccgccacgccagcgcggccagagtgacaaacagcaccggcacagtcatgacaatgccggtacggaagtaatatccccaagtgattgtcatatttttctgggcaagcacatgcagccacagcagagttgccagactgccaatcggggtgattttcgggcctaaatcacagccaatcacattggcataaatcattgcctctttgacgacgccagtcgccgtactcccgtcaatcgacagcgcaccaatcagcaccgtcggcatattgttcatcactgatgagagaaatgccgtcaagaagccggtgccgaacgtcgctgcccataaccccttgtctgccagcagattcagcacgccagacaggtactccgtgaaccctgcattgcgcaggccatagaccacgatgtacatgcccagtgagaaaataacgatctgccatggcgcaccgcgcaggacttttccggtgttgatcgaatgacctcttttcgccaccacaaacagcactgctgcgccagcggccgctatcgcactgaccaggattccctgcggctccagaaagaagaaaccgacaagcagcaataacaggacaatccagcccgccctgaaggttgccagatccttgatcgcactggcaggcgtcttcagcagcgaaacttaatacgttgccggaataactctgcgaaagaagagatacagcataatcagcgtggccgcaatcgctgccgcatccacggagatcataacggaggcgtactgcgcaaagctcagaccgaagaagtccgccgagacgatattcaccaggttagaaacaatgagcggcaggctggccgtatctgcaataaatcctgcagccatgacaaaggccagtgtcgtgccctggctgaacccagtgcgatcagcatcgcaatcacaatcggcgtcaggatcagcgcggcgccgtcattggcaaacaacgcatcaacagcggcaccgagcaagactttccaggtgaacagcgctctaggtaggaactttgtcgttgatagagtcttcagccatcaacactgtatcgagtaatgaaattggttgctagaaagtcgatgatttgttgcgtatgattaaaaatcaaccttaaaggctttatacatggatttgctatggcttttgtatcagaaagagaaattgtaagaaagatatttagcaaaaaaattgactttacgatcttggcatttttctatatttcctctattttttttcttctttgtagtggcgttctctttcaatattttaccgctgccttcacaaaaggtaattgttatgaatgctcaatgaaacttgattacataaaacaattttatttttcactggaaaccgcatggtacctcatatctgctgttgcagtatttattgcatctgtttttatacagcatagaattaaagcttatttaacattattagctattacatggattgtactaacaataacagatgtggcgttaatacacgccttagacaatatagccatgaataatattttgttaaatatactatataatctttttggggcgattttattgtcactgtttatgtgtttatcaaattccctccttttccaccttaataagataaaacatattccaatgattttatcggcaatgattccattagtttccgcaataataatagccatactcataaccgctgttatatatttattgtttgcccggcaggcggtagagattgagatggatatatctgaaggttcagacatcgcatatgtaggtgtaaaagataatgaggaatcatttgggtttttaaatgataaaaaaacagacacaccaacgtatctggatgtaatcaaaaatggtagtttgatatataatgatacacagggtttaagtggtgctgatatttatattgtctccggttgttatgcccttccagatttacttcgcaatgtaccgcttgatgctaaaaaatcttttctgaatgtaaaaaagctagaaatcacacagaaacttccaatgatggggttcatacaaggtgaatccgctgatgtgatgcctaaagcagcatccaggttaagtttgagcaagcaagatgataaatttatgctagcctcaagtgttactgactctcaaataaaatttaaatcaaacaatgcacaattgatggttgctttcgcatttatgccaataacaacgaatggtattttacatgattatacatacgatataataataaatgataaaaaatataaaattgaaaatcatgttgcacctctatctaggcttgataaaaataagaagatgaagtgtgaataccagcaaatatcggatttaacaaatacgtataacattaatgcaaattacttaacgggttttttacttgtcctaaaaccagatgatattattaattacaacaatagcccttccgtactactcaagactgattttgcgttctataaaaaaacataccagaagcttgataaaatatatgatgacataagcaatggaaaattatcttcactgagagcaacaggtatctcccagtttagtatcaacgggaaacatttgtcgttaaggccagaatcggagattattatttctgaagggagtttgtatggactagttaataaaagcaaaaaaatcaaaatatatggcacagcagatcttgtttttgttgataacaagataatgaaccttcgtaaaataacttatttgcaatctaagctagaaatttttggttcttctattatggatatattaaagtatatatttggtttaggtctgctagcaatttctataaaattcattcattcttactttaagaatgatgtgaatgaaaatttattcttgtaacgcatttggctccaattggagcctttttatgactatttattaaaatatcctaagttaagcctgtttttaaagcaggcttgagcgtgaagcggacactcatacctgctttaaagtggcgtttttgtcgttacccatacctatattttctgttgtttaactgccagaactgagcggttgaaaagccagaaatatgccgagccagcggcatggaagcgccagcagctgttgaatggagtactgtaggcaaatggtgccgtaaccggctttcgtactgaaaggttctgtctatcccatcccttctcttgtatctaacatttagttgtgaatagctactgtaaatgcccctacaaaatgaaccattatttttagagggcgtctggcactccaacttccgcttttggcacagaacggcctatcagcaatataaaagcattcagatatatatcatttctacaaacatacccgattaacggcagaatctcaggattctgccgcttttttattatttttcaggggagtagtaatgagcaactctgaaggttggtagtcattttagcaaacgctttctggtctgccgcagtgggcatcggctgattgcgtagcagggccactggtatctgccggtatcaccgacattaacattgaagacgaccagggcattcacgtccgcctgatagttcgtgatgccgaaggtcggatggttggcgggcatggaactttgaaccggacgccggtgaaggttttaaccgctatatccacaggtcaggcatccgcaccgacaccttcccccgctgactccgaatcatttaccagcaacatttcaccttcccaaacgcgctttattacctcatacgccagccatcgccgctggcgttttttattcacggagacatacccatgacaacacagacacagtacgacctcgtacccgctaacggatccgaatttgagttgagcgtaacgcaggtacccgatgaacagcatatccgcttctggccgcagcactttggcaccatcccgcagtggataacgctggaaccgcgcattttcgcctggatggaccgcttctgtgatgagtactgcgggggtatctggtccttttacacgctcagcaatggcggagcgtttatggctcctgatgctgacggtgacgataaatggcatttgctcaacggcatgaatggcaatggtgcggaaatgagcgcggaagccgcaggtatcgctgtctgcctgattgaatatagccatcacgcctgcctcaccgaatgcgatgccatgacggagcactattaccgcctgcgggattacgctctgcagcaccctgaatccagcgccattatgcgcattattgattaaggatactcatgatggaacagtcactcatcccacagacaccggtacttccactgaccgcacaacgcacggtaaaacgcgccttaacgctgcttgaccgacacctgcgcgaaacaggcgtggcattcacctccactcaggctgctcgtgactggctgaagctgaaaatggcggggctggagcgtgaagaatttatgatgctgtatctgaaccagcagaaccagttgattgcccacgaaaccctgtttgccggttctattagcagtaccgaggtacatccccgtgaggtggtcaaacgcgccctgtatttcaatgcagcagcagtgatactggcgcataaccacccctccggcgacactactcccagccaggcagataagactataacgcagcgtctggtgcaggcgcttcagctcgttgatatccgtgtccctgaccatctgattgttggtggcaggcaaatctattcgttcgcagaacacggtctgctttgaggtattacatgagaattatcagtaaacgccgggcaatgacgatataccgccagcatcctgagtcccgaatctttcgctactgcaccggaaaatatcagtggcacggtagcgtctgtcattacaccggcagggatgttccggatatcacaggagtcctggctgtgtacgccgaacgccgcaggaccgcagcggaccgtatgcttgactgatgagtatcaccctgaactgacaataaagaggttatgaatgagcaacaccacatggggcctgcagcgagatatcacgccgcgcctgggagcacgtctggtgcaggagggcaaccagctgcactatctggctgaccgggccagtatcaccggtaagtttagtgacgccgaatgtcctaagctggatgtggtatttccacattttatcagccagatagagtcgatgctgaccactggtgaactgaatccccgccatgcccaatgcgtcaccctgtaccacaacggttttacctgcgaagccgatactcttggtagttgcggctacgtatacatcgctgtttaccccactcaacgctaactaatttcacgagagcaagcatgaacactctacctgctacaatttcgcaggcggcgaagccctgcctgtcgccagtggctgtctggcaaatgctactgacacgcctgctggaacaacactatggcctgacactgaacgacacgccgttcagtgatgaaactgttattaaggaacatatcgatgctggtatcactctggccgatgcagtcaattttctggtggaaaagtacgaactggtacgtatcgatcacagaggattttcgtggcaacaacagtctccatatatttccgtagtagatattctgcgagcaaggcgctctaccggcttgctaaaaactaatgtgaaataaacgcttaaatacagagcagactgaaggaaagcaaaatgctaatctcatagacgaagagactcccgctgtaacctcccctcccccgaaaaaacctgacattttcttttaggaccaacaatgggaccaaaatgaaaattgaactgaagattacaatcaatttaacaacaagttacacaaccaattcagactccgccagcccaccaatcatgattggacggtgtaaggacaacaccaacaaaaacaggaagttagaagtctcagcaaaacaccgaccagacggtgaggagacataaaaggatacgcaaaggagccgcggctcctggtaacatgaaagcccacagatgtgggctttttcgttgatggtcagaacgaccagttcacaccagctaccgcgttccacggggattccacaccggcactatggctataccccaccccaagatgcccgcttaacgtactgctgaatgaggctttaatacctgcctggtatattccacgtctgcccgacaaataattgacgaaattaccgtcactattcactttcacccggttatcatcgacaaattctttgcgcacagccgccttcagccacggctcaacttccataccgttccccagacgcatgttgtaactcagcgttgcgcccagttcacgatatatactgcgggtatcgactgatttcgatttcatgccattggataaatgatattcggggttatcagcggtgaaccccgttaacgatgcatacggcgtcaggttccagttaccatcggtaaatcgcatcccggtttcaatgtgaccgcccagcccgttgctgtggtaactgccattggcggctccaccgctgctcattttacctgctacgttacttttaaaacggttcagcttcacgacaccgtccagatagaaaccactttcatgttcccaactggcatagccgcccagagaataactgcccacactgccatgtcctccgcgatcaaaaccgatatgtgaatgggaatagcccataaaagcgcctagcgtggtaattccttcaggaatatcattacggctgtcgatccccactgtcattccggtcagcgtctgctcaaacccggcacccgcatcggtggtgacattattacgggtgttatacgtcgccccccagacattattgttgtgtggactcgctttcattatgttcaaccgctcgcgaatactgtttagctcagcatcaaataccaacggtaatgttgctgccatattgagtacggctgccgtagaaggcgtaatgcgtttctccggaacgggtgtcggcgttggatcgggagtagggtctggttttggatttgggtctggctttggatcgggttttgggtctggctttggatttgggatggggtccgggttgggtttgacatcattggtcaggttccagttgctgttgccgtcacttttcaggacatactcataggtcccaagatcaacgaaaccgccggtattgcccagcgtaaacgaagcatcccctccccctgttttcaccagcgtcatcgcgtcgtcagactgtgggctgacgccggtatcctgaacaaagattttaaaattaccagtggcgttgttgttgacgaccagttgatcgccccgggagcctgcaacgttggtatgcaggtagaaattaccgctaccggaaagttcattggttgtcagcgtattgtagataccgttagttgtggcaggcgctgctgtttgtgctgacaaataaacatcaccgtcgttgagtagcaaactgtttactctatattcgcagttgctggtacctgcacaggaattattgctgttaagccagacactgccccggctggcagccgtcaggtcggcaagcgtggtatcgacgccatttcccagagtcaatgtcgcgctatcggtaatccggaccgccccttcgagtttaactggcgtaacattatcccgtggcgtcattaacgacaggcttcctgtcgcgccactgaccgatgcatccgccagcgtacctgcgtagacgattgccgtaccgccagcgacctggagatcttctgcccgggccagagcctgaaactcatcttttgaccgcccaagggtatattgcccgccagagttaacctttgtggcggagtcctgacccaggttttgcattgccccacccttgccaaccgtggagtcgcgagcttcggtacctgctaataccaataaattaccgccattttccagcaacatattggtcgctaaattgccggaaatggaaaaagtaccgtactggtgagtaccgctgatttcaataccgttagccgtgctcgtctggagagcggcaccgctgttctggacgatatctgtcgctttgccattatcgttgactgtcagcgtaccgccttcattgatctttgtttttattgcctctccgttagctgaaactgtttgtattccgccgtcgttaattgttgtctcattcgccacaccctcgacaatttgttcaccgccggtgagcgtcgtgcctgtcgcagtggcttttgttttgacgatctcccgtccgcccatattgacctgtgttttgtcagaagaggtgtctgactccacggttaacacgccgccatttgccagcaggatattgttcgccgcaccctgctcgatgctgaacgcgacgccatccgcgcgtgttcctgtgacccgcgtcgccctggtggttgcaaccaaagcgccctggctactctgctgtatccccgttgcgctgcctttctcccgcacatcgagtgtgccgccgtcattaagcaccgagttttcagccaggccgccctcattaactacctgtgaacccccattaataatggaaccttccgctgtcccgtttgccataatttgttgtaggccagagacgatatcggtattgattgccttaccataattctgaacggtttgcgtgccaccattgatgtgtgttttctctgttgacccaccatcaacaatttgttcaccactttcgatatttgcttcagtggctaaaccatataccgtttgcttgccacctttgatatttgctttatcagaagtggcactggcatatattgtttgggtgccagcactattgagtacagtgccaacatcttttccataaacatccattttgccgttggcattaataatcgtgtcaactgcgcgggaaccagtgacgactgttaatgagccagcgttttccagcactacatttttagcttctgaattcctgatgtagaaagcatcaccataactgttggttccttcgataagtgttccggaggtcgtggaagcaattaatgcgccgccggattgttgctcaacatgcttagcctcaccaccgtcctgaacctccagaacgccgccattattaagtctggtgctatctgttttagcctccttctggacaatcagcttaccgccagtatcaatggtagtatttttcgccgaggttttagccactaccgtcagttcgccggtattttccagcacaacataattagcctcccctccggtaatagtgaagtgagagagcttgttgtatccttcgatatcagtccctgcacccgtgttggcaactaaagcactgcccgtctcctggttaaccccatgtgcaataccgccggtatagacaatcagcgagcctccggcgctaatattgctgccaattgccgtaccatctttctcaacaacctgccggctcccggaggatataattgttgtgtcagctttcccgccgcttttgatattttgcgttccgctgttgatattggtgcctgtggctatgccataattattaatattctgtgtgccaccattaattatggtatttgtcgcgtttcctgcaacatccataaccccgccattatctattcgggtcgcatcagctttagcattggttaaaactgacattgttcctttatctttaataatcgtcttgtttgccgaaccatatgcgtttatgtctaaatgaccaccgttttccagcaacacattgtctgccacgtgattgtggatggagaatgcaccttcactattcgtaccgctcaccgtcgtaccgttagtgttagtttttaaaattgcaccatcgtgctgggtaacatttgttgccgtaccacccctaacatcaagcacgccaccagaataaacttcaataacatccgaggtgctggtgttatcaacaatttgcgtgccaccagaatagatatgcgtattttttgccgttgacttactattcagagactgagttccgccttcaatcgtcgtgtccagcgcacggctctcatatactctttgctcaccgccatttttaatggttgttgtttctactgtgctctgttcaacatactgtcgaccaccatttatggttgtgttcgttgccagacttccttgtactacgtcctgagagccagacttatttatcgttgtaccatcagcatgcccttgaacttttactatctggctaccaccatcaatgagtattccattcgcactccctccctctacgcgtgaagcaccgcccttaattgtcgttccattgctgataccccctttataaacgtcctgattgccactctcgattgtcgtacctgtggaaatacccccgtcatgaattgactgtctgccaccgttaatggttgtattattagcctgccccacaaaattgttatgacttcctatatcttgatatccaccagattcaataagacttccattagataccccgccatgaacattctgctggccatggttgataatatgagtgttatttgttgtacctcgttcatccactttttggttgccatctacagtctcatcgtttaccacaccaataacattagtagtgaaggcagccatcccgggcggggcatatatcaaggcagatatcaataaggaaagtactgagcggcgacaataatagggactggtcctgttcataaatttcatcctctgaaaagtgaatactgagtagcgtttaagcgaccttagctttgctgcaacatcagcccacaggcaccagaccaggggattcatcctgaagagacagcgcaagtgtattgtgttcaccgctcatcaaagacatcatgatgaaatgatgatattccgcataagaatgaggcattttttaaacgcagtgcgctgaagtgtggttggataaaaaagtcaatccattcaggaaatacgggcgtattcttttctttcgacaatgaggccgttggcaaaataaaatgatttacataatcgtttctgatgaatatcttctgctcacataaaaatcacacaataactttgagatcgcagattgttttacttttacagcattcgtccccccattgttgggcaaatatagattgggccagagcacgaaagttaataccacgttcgcacagctcctccaacagcacgacaagatgccacatactgcgccccagtcggttcagtttacagactagcagtgcgttccctgccgatgatgtcctgaccagttttttcagtccggacctcctgccacggttttacgttgaagtggtaaccctgagcacgcagttcttcagtcaggcgtggtgcaccgtaacgctgttattgctgggtaagatcaaaaaactttcaggcagctaaggaaagttgaaccagacattagatgaaatatttcaaccaattacagcaccaattcagtcactgccagcccaccaaataaatcaaggggttacatgaaaacgtagcccctttttctttggtagtgacactaaaatggatgtagtgtgaagaataatcccgtttactcaatcaataatacatattgtttcaatctacgttattatctctttgtaaaaattgccatttattaatcattgaaaactgcttttagaacttgatacaacgggactagtcacaacaggactattctcaacgggatcatcctcagaggaactatcatcaaagtcatcatccataaataaaatatcatcgaatggtgccacgcccgtgatgagttttattttattattacgatcagtcaatactccacttaaaccgttttcgctcacaggttttaatgatttttcattactcttgttgtaagcaggcgcattaaaaatacacggagtatcaacatcaaacaatgacgttccccagttcacatattgaatatcatagttactgaagttctgtccagaaaagaagcaccccttaaaatccaatccacgtaaattatataaaccaccctcttctttttggagagtaatgttaattttggctatctcccggacatcatcgccatttttgtatttgaataccgtttcaagatgttctccagacagcttgacttcaggaaataatttgaaatcaaagcctatattattatgtgtcaacgtagatgaacaaaaaatggaaaaagcttgcagtgctgaattatagctatcgattttatcttgaggctgagctcttggtaaaaacttatagcaacactcataaaaattaaacagaagctctgaagaccttgtatttttatcaaataatacccccttgaactcattcacaaacgcatcttttttttcttgaatatctatggggtgttcctttgactctgacaaagatgaaatctcatctattttgttttcatatgaattacgtgattccatacagacatttggcggcgtttctaaaataacactacgcgtactacttggcttaagtaaaccaacatgaaaatcactttttcttatattatcgaaaaggttctattcatttcttttagcgcattcaaaaaactgatcggcattatttttattcgataattttttagtttcagaaaacacattttcattgttttccagctttagtttaatgagaagattttcccagacctgcttgcttaaacatattacgtcaggctcaccagaactaactaactcgtgattattattaaagtgtacgttgaatacctttaagttattttcaccaacttcatatttaatacgttttaattgttctccagctcccataatgacaaaggcgttgccttcttgatatatacattcagacatcattttttgtaaagtttcaagagcaccgcgatacgtctctgatgcagcttccttacaaattaattttaaaatactatgagctagtagctccatgtgtttagaagatttattttcattataacttccactacccaaaactgcgctagcgttaaatccgttgcttttactaactaacattgtctattcctcaattaatgtctacatggctatttttaatgttattactgtttgtcactataaaaaaacgctcatttgagacaattactgacattaactgcttcacttgctacgcatggaacttttaattaaattagcacaggaatgttaaatttaataaacaaaaggttatttcgctgtatgataaaaaaaaccgttataatttattagtgaaaatcgtttttcaagtgttagaaatttatatctcaatagcgttggttaatgagcatagccacgctcctgtaacgctcacaaaactcatctgcctgcggcgggtgttctggtcagtagtagatgtttaaggcgtggcagagacatttcatccttactctacggcattgttctacatacattggttgtggtactcacttatcatcagtgagcgaacagagaatagttcagtgatttgagtaattaacctgattaaatgaaggggtataataaatgataatactctggctttatcgttaattacttaattccacatgtaagcaatttgcccgcttggcatagcaggcattttttccaggtacttttgaatgagtactgatggataaatacattgcagtggcgtgccacgtaccaaaacaccagccctcattcgaaaccacccaccgcacttcttccttgaaatggcgttagtcatgaaatatagaccgccatcgagtaccccttgtacccttaactcttcctgatacgtaaataatgatttggtggcccttgctggacttgaaccagcgaccaagcgattatgagtcgcctgctctaaccactgagctaaagggccttgagtgtgcaataacaatacttataaaccacgcaataaacatgatgatcatatgatgtaaataacagatttttatgcgttcccattcaccttgggtcgtgattacacgcgacataaaacccgacaccgcctccattcgcaaagtcgatactcgcagtcaacaagcaaatgttaataattagcactatctatagttatcatcgattcaatgatactttgtaatgattttgtatctaataatataactttattacattagctgaagagttttcgcatcattatgatatctgttacttttcactccataaaaataaacttcgtatagcaatatattctttcatagatcttattctgctaatcattagtttcgtatgagcgatttttgacagttgcctctccagaccacatcgataattaataaaacagatttaagcattatccttttccatataaatattggataaaagtaggacatctgtttgcaattactttcacaacaattaaacatttttatgtttccgtatacatcatattactctaccattagaggaactttattatgttttctataaaaccaggacccagaaatttacctatcgacaaccccacattgttatcatggaacattactgacggggatctaaattccaaattaaatacattagaatatctaaactgtataacaaatattattaattcttgtggagtttaccctcaaggattaaaagacagagaaattatatcaacttttcacgcagaaaaagttattaatgatctgttaaaaaacgattataaaatttccctttctccagatacaacttaccgagagttgaataaagcagcacagcgtagcattacagcgccagacaggataggagaaagaaaaacataggtttatcaacgagatacaatgattgaaagaggtgataacagcggtgtttatcagtatggtcgtgctgaacatttcacccacattatatctgacaaaccttccccaaaagataaatatgttgcatatgctattaacattcctgactatgagctggcagccgatgtatataatattaacgtgacgtcaccttccggacagcaagaaacatttaaaatattaatcaatctagaacatctacggcaaacacttgaacgtaaatctcttactgctgttcagaaatcacaatgtgaaatcatcacccccaaaaaacctggcgaagcgattcttcatgcttttaatgccacctaccagcagatcagagaaaatatgtctgaatttgcacgttgccattatgggtatatacaaatccctccagtgacaactttccgcgccgacggaccagaaactcccgaagaagaaaagggttactggtttcatgcttatcaacccgaagatctttgtaccatccataatccaatgggagatttgcaggattttattgcattggttaaagatgctaaaaaatttggtatcgatatcattcctgattatacctttaactttatgggaattgggggtagtggtaaaaatgacctggattatccctctgctgatatacgagcgaagatcagtaaagatatagaaggtggtatccctggctattagcaaggtcaggttttgattccattcattaaagatccagtaacaaaagaacgtaaacaaatccatccagaagatatacatctcactgcaaaagacttcgaagcaagtaaagataacatctctaaggatgaatgggaaaacctccatgcattaaaagaaaagcgtttaaatggaatgcctaaaacaacacccaaaagtgaccaggttattatgttgcaaaatcaatacgttcgtgaaatgcgaaaatatggcgtacgaggtttacgttatgatgcggcaaaacactcaaaacatgaacaaatagaaagatcaataaccccaccgcttaaaaattataatgagcggttacacaatactaacttatttaacccaaaatatcataaaaaagccgttatgaattacatggaatatctggtaacttgtcagttggatgaacaacaaatgtcatcactgctttatgaaagagatgatttaagcgccattgatttttcattgctcatgaaaacgataaaagccttttcatttggtggagatcttcaaacccttgcatcaaaaccgggttccacaatctcaagtatcccatcagaaagacggatattgattaacattaaccacgattttcctaacaatggtaatcttttcaatgactttctatttaaccatcaacaagatgaacaattagcaatggcatatatagccgctctgccgttcagcaggcctttagtttactgggatggccaagtattaaaatcaacgactgaaattaaaaattatgatgggtccacgcgtgtcggcggtgaggcgtagcttaataaaggttgctctacctatcagcagctctacaatgaattccacgcattatatatagataaagcaggaatatggagcgcatttgagggtgtatctgcaactaaaaacgttctggcctttagtcgtggggattctgtgaacattaatcactctcctcatgatggactagttataataaataaaggaaacgaagaagttgaaggtacctggcctaacaaattgcaacctggaatatacaaaaacatggggagtaatagcgttaacattattattaataatacccgaaaaattatcccccctggtaaagtatttacgcttagaggcggaactctaaatatcaatattcctgggcgtagcgctcttcttttagggaaaacaggagaaccgccgaactatctctatttataatttaatgttatatctgccccgataaaacggggcagataatatgtttagtttactaacggtcattttgcagtgaagccatttactgttttttatcgaccagataatctgttctctaatgttaactccccctaacctgttgctttagttattcatttcctgtctcactttgccttaataccctacgttaaatgttactaatttgttgcttttgatcacaataagaaaacaatatgtcgcttttgtgcgcatttttcagaaatgtagatatttttagattatggctacgaaatgagcatcgccatgtcaccctacatctcataagaggatcgcttctgatgaatgcactgaccgccgtacaaaataacgctgtcgattcaggccaggactatagcggattcaccctcaccccgtcggcgcaatccccgcgtctgctggaactcaccttcaccgaacagacgaccaaacagtttcttgagcaggttgccgagtggcccgtgcaggcgctggagtacaaatcgtttctgcgttttcgggtagccaaaattcttgacgatctatgtgcgaaccagctgcaaccattgctgttgaagacgttgctaaaccgcgctgaaggtgcgttgttgatcaatgcggtgggtgtcgatgatgtgaagcaagcggatgagatggtgaagctggcgacggcggtggcgcatctgattggccgttccaatttcgatgcgatgagcggtcagtattacgcgcgttttgtagtgaaaaatgtcgataactcagacagctatctgcgccagccgcaccgcgtgatggagctacacaacgacggcacgtatgtcgaagagataaccgattacgtgctgatgatgaaaatcgacgagcaaaacatgcagggcggaaattcgctgctgctgcatctcgatgactgggaacatctcgacaactatttccgccacccgctggcgcgtcgcccgatgcgctttgccgcgccgccgagtaaaaacgtcagcaaagatgtttttcatccggtgttcgacgtcgatcaacagggtcgcccggtgatgcgctatatcgaccagttcgtccagccgaaagacttcgaagaaggcgtgtggttgagcgagctttccgacgccattgaaaccagcaaaggcattctttctgtgcccgttcccgttggcaaattcctgttgattaacaacctgttctggctgcacggtcgcgaccgctttactccgcacccggatctgcgccgtgaactgatgcgccagcgtggctatttcgcttacgcctctaaccactaccagacgcatcagtaagcgcaaaggaattgagcggatgtatgattttgtgattattggcggcggcatcatcggcatgtcgaccgccatgcaactgattgatgtctatccggacgcccgcattgcgttgctggaaaaagagtccgccccggcctgtcaccagacgggccacaacagcggcgtgatccatgccggggtctattacacgcccggcagcctgaaggcgcagttttgcctggcgggaaaccgcgccaccaaagccttttgcgatcaaaacggcattcgctacgacaactgcggcaagatgctggttgccacgtccgatctcgaaatggaacggatgcgcgccttatgggaacgcacagcggcgaacggtatcgagcgcgaatggcttaacgccgacgaactgcgcgagcgcgaaccgaatatcaccgggctcggcggcatttttgtgccgtccagcggcattgtcagctaccgcgacgtgacggcggcgatggcaaaaatcttccagtccagaggcggtgaaattatctataacgccgaagtcagcgggcttaatgagcataaaaacggcgtggtgatacgtacccgtcagggcggcgaatatgaagcatcaacgctgattagctgttccgggctgatggctgaccggctggtgaaaatgctcggactcgaaccgggctttatcatctgcccgttccgtggcgagtatttccgccttgcgccggagcataaccagattgttaaccacctgatttaccccattcccgacccggcaatgccgtttttgggcgttcatctcacccgcatgatcgacggcagcgtgaccgtcgggccaaacgcggtgctggctttcaaacgcgaaggctatcgcaagcgcgacttctcatttagcgacacgctggagattttgggctcgtcggggattcgccgggtgctgcaaaaccatctacgctcaggactgggcgagatgaaaaactcgctgtgcaaaagcggctatctgcggctggtgcaaaagtattgtccccggctttcgttaagcgatctccagccctggcccgccggtgtgcgggcgcaggcggtatcgccggacggcaagctgattgacgattttctgtttgtcaccaccccgcgcacgatccacacctgcaatgcgccctccccggcagcgacatcagcaattcctattggtgcgcatattgtcagcaaggtacaaacgctgttggcaagccagagtaaccccggacgcacgctgcgagcggcacgtagtgtggatgccttacacgccgcatttaatcaataacctttgaaaacaggatgtagcgatgaaacttaacgacagtaacttattccgccagcaggcgttgattaacggggaatggctggacgccaacaatggtgaagccatcgacgtcaccaatccggcgaacggcgacaagctgggtagcgtgccgaaaatgggcgcggatgaaacccgcgccgctatcgacgccgccaaccgcgccctgcccgcctggcgcgcgctcaccgccaaagaacgcgccaccattctgcgcaactggttcaatttgatgatggagcatcaggacgatttagcgcgcctgatgaccctcgaacagggtaaaccactggccgaagcgaaaggcgaaatcagctacgccgcctcctttattgagtggtttgccgaagaaggcaaacgcatttatggcgacaccattcctggtcatcaggccgataaacgcctgattgttatcaagcagccgattggcgtcaccgcggctatcacgccgtggaacttcccggcggcgatgattacccgcaaagccggtccggcgctggcagcaggctgcaccatggtgctgaagcccgccagtcagacgccgttctctgcgctggcgctggcggagctggcgatccgcgcgggcgttccggctggggtatttaacgtggtcaccggttcggcgggcgcggtcggtaacgaactgaccagtaacccgctggtgcgcaaactgtcgtttaccggttcgaccgaaattggccgccagttaatggaacagtgcgcgaaagacatcaagaaagtgtcgctggagctgggcggtaacgcgccgtttatcgtctttgacgatgccgacctcgacaaagccgtggaaggcgcgctggcctcgaaattccgcaacgccgggcaaacctgcgtctgcgccaaccgcctgtatgtgcaggacggcgtgtatgaccgttttgccgaaaaattgcagcaggcagtgagcaaactgcacatcggcgacgggctggataacggcgtcaccatcgggccgctgatcgatgaaaaagcggtagcaaaagtggaagagcatattgccgatgcgctggagaaaggcgcgcgcgtggtttgcggcggtaaagcgcacgaacgcggcggcaacttcttccagccgaccattctggtggacgttccggccaacgccaaagtgtcgaaagaagagacgttcggccccctcgccccgctgttccgctttaaagatgaagctgatgtgattgcgcaagccaatgacaccgagtttggccttgccgcctatttctacgcccgtgatttaagccgcgtcttccgcgtgggcgaagcgctggagtacggcatcgtcggcatcaataccggcattatttccaatgaagtggccccgttcggcggcatcaaagcctcgggtctgggtcgtgaaggttcgaagtatggcatcgaagattacttagaaatcaaatatatgtgcatcggtctttaactggagaatgcgaatgaacagcaataaagagttaatgcagcgccgcagtcaggcgattccccgtggcgttgggcaaattcacccgattttcgctgaccgcgcggaaaactgccgggtgtgggacgttgaaggccgtgagtatcttgatttcgcgggcgggattgcggtgctcaataccgggcacctgcatccgaaggtggtggccgcggtggaagcgcagttgaaaaaactgtcgcacacctgcttccaggtgctggcttacgagccgtatctggagctgtgcgagattatgaatcagaaggtgccgggcgatttcgccaagaaaacgctgctggttacgaccggttccgaagcggtggaaaacgcggtaaaaatcgcccgcgccgccaccaaacgtagcggcaccatcgcttttagcggcgcgtatcacgggcgcacgcattacacgctggcgctgaccggcaaggtgaatccgtactctgcgggcatggggctgatgccgggtcatgtttatcgcgcgctttatccttgcccgctgcacggcataagcgaggatgacgctatcgccagcatccaccggatcttcaaaaatgatgccgcgccggaagatatcgccgccatcgtgattgagccggttcagggcgaaggcggtttctacgcctcgtcgccagcctttatgcagcgtttacgcgctctgtgtgacgagcacgggatcatgctgattgccgatgaagtgcagagcggcgcggggcgtaccggcacgctgtttgcgatggagcagatgggcgttgcgccggatcttaccacctttgcgaaatcgatcgcgggcggcttcccgctggcgggcgtcaccgggcgcgcggaagtaatggatgccgtcgctccaggcggtctgggcggcacctatgcgggtaacccgattgcctgcgtggctgcgctggaagtgttgaaggtgtttgagcaggaaaatctgctgcaaaaagccaacgatctggggcagaagttgaaagacggattgctggcgatagccgaaaaacacccggagatcggcgacgtacgcgggctgggggcgatgatcgccattgagctgtttgaagacggcgatcacaacaagccggacgccaaactcaccgccgagatcgtggctcgcgcccgcgataaaggcctgattcttctctcctgcggcccgtattacaacgtgctgcgcatccttgtaccgctcaccattgaagacgctcagatccgtcagggtctggagatcatcagccagtgttttgatgaggcgaagcagtagcgccgctcctatgccggaggcgacgctgcgcgtcttgtccggcctacggggatccaggtcggataaggcgtttacgccgcatccgacaatctgtacgtgaacaggaagaaatctatgttggccgggtaaggcggagccgctctccggcaaaaagaatcaataacaattatacgcgtgacccggcgcgggaaatgtcggggcgctctcccaagtgacacactttcgagaggattcaggatggggcaatcatcgcaaccacatgagttaggcggcgggctgaagtcacgccacgtcaccatgttgtctattgccggtgttatcggcgcaagtctgtttgtcggttccagcgtcgccatcgccgaagcgggcccggcggtattactggcctatctgttcgccgggctactggtggttatgattatgcggatgttggcggaaatggcggttgccacgcccgataccggttcgttttccacctatgccgataaagccattggtcgctgggcgggctataccatcggctggttgtactggtggttttgggtactggttatcccgctggaagccaacatcgccgccatgatcctgcactcatgggttccaggcattcccatctggttattttccctcgtcattaccctcgccttaactggcagtaacttattaagcgttaaaaactacggcgaatttgagttctggctggcgctgtgcaaagtcatcgctatcctggcctttattttccttggtgcagtcgcaattagcggtttttacccgtatgccgaagtgagcgggatctcaagattgtgggatagcggcggctttatgcccaacggtttcggtgcggtattaagcgcgatgttgatcaccatgttctcgtttatgggcgcagaaattgtcaccattgccgccgcggaatccgacacgccggaaaaacatattgtccgcgccaccaactcggttatctggcgtatttctatcttctatttatgttctatttttgtcgtcgtggcattaattccgtggaatatgcccggactaaaagccgtcggttcttatcgctcggtactggaattgctcaatattccccatgcgaaattaatcatggactgcgtgatattactttccgtaaccagttgcctgaactcggcgctgtataccgcgtcaaggatgctctactccttaagtcgtcgcggtgatgctcccgcggtaatgggtaaaatcaaccgcagtaaaaccccgtacgtggcggtgttactctccaccggcgcggcattcttaacggtggtggtgaactattacgcgcctgcgaaggtatttaaatttctgatcgacagctccggcgctatcgccctgctggtttatttagtcatcgccgtttcacagttgcggatgcgcaaaattctgcgagcagaaggaagcgaaattcgcttgcgaatgtggctttatccgtggctcacctggctagtcatcggctttattacctttgtgttggtagtgatgctattccgtccggcgcaacagttagaagtgatctccaccggcttattagcgatagggattatctgtaccgtgccaattatggctcgctggaaaaagctggtattgtggcaaaaaacacccgttcataatacgcgctgatcatgatcaggagtcacaccatgaccattacgtctctggatggctatcgctggctgaagaacgatattattcgcggtaattttcaaccggatgaaaaattacgaatgagtttgctgacatcgcgttatgcacttggcgttgggccgttacgggaagctctttcgcaactggtggcggaacggctggtcacggtggtgaatcaaaaagggtatcgggtggcgtctatgtcagagcaggagctgctcgatattttcgacgcccgcgccaatatggaagcgatgttagtgagtctggcgattgcccgcggtggcgatgagtgggaggcagacgttctcgcaaaagcgcatctgctgagtaagcttgaggcctgtgacgccagcgagaaaatgcttgatgagtgggatctgcgtcatcaggcgtttcatacggcaattgtggcgggctgtggttctcactatttgctgcaaatgcgtgaacggttgtttgatctggcggcgcgttatcgatttatctggctgcggcgaacggtgctttcggtggaaatgctggaggataaacacgatcagcaccagaccctgactgcggcggtactggcgcgagataccgcgcgcgccagtgagttaatgcgccagcatttactgacgccaattcccattatccagcaggcgatggctggcaattaactactcttccggaatacgcaacacttgccccggataaattttatccgggctttttagcatcggtttattcgcttcgaagattttattgtacagattagcgttaccgtagacctgtttggaaatggcactcagagtgtcgccagacttaacggtataaaactggctggcagtggctggtgtcgccgttttcacctgatcatcgacactggcaataccggaaatattccccaccgcaacaaggattttctccttcgcctcctgactcaggccgtcaccagtgaccgtcgctttgccgtcggcaatttgaatattcactttatcggcatccggtataccggttttgttcagatgctcctgcaccttcttcgcctgatcgtctttatcgtgctgacctgtaaccgcgtcccagagtttttctccggcatctttcacaaaattgaacagacccatagctacctcattcgttaacggaaacactcagaaagtgtagcagaggaacgcggcgcgttaacgccgcggggatgagcacaggtttaatcgcgggtttgcacccagaacgcgtgaatcaaaccggggatatacccaagcagtgtcaacagaatattaataatgaacgcccaaccgaaccctttaccgagcagcacgccgagcggcggcagaatgatggtgatgacgattctccagaaacccatatgtactccctataagaaaattactcattgtttaaaaagagattttatctcttaagcgtagtaattttagcggagcctgccagtttcagcttacgcttttactctcatttacgctgctgaggctggtatatgttgcatttttagtttagagtttacttaatttagaaaatacttaaataaatatgactgaactcgcgcaattacaggccagtgccgaacaggcagcggccttattgaaagcaatgagccaccctaaacgattgctgattctgtgcatgcttagcggttcccccggcaccagcgcgggagagctgacgcgcattaccggactgagtgcctctgcgacatcacagcatctcgctcgtatgcgggacgaagggcttatcgacagccaacgggatgcccaacgcattctatattccattaaaaatgaggcggtaaatgccattatcgccaccctgaaaaatgtctattgtccgtaaggagtcactatggctttgacaaccatttcgccgcatgatgcacaagaattaatcgcacgcggcgcaaagttaatcgatattcgtgatgctgatgaatatcttcgtgaacatattcctgaagcagatctggctccattatccgtgctggaacagtcaggtcttccggctaaattacgtcacgagcaaattatattccactgccaggcaggtaaacgcaccagtaataatgccgataaattagcagcgattgccgcccccgcagaaatctttttactcgaagatgggattgatggctggaaaaaagcaggattgccagtagcggtaaataaatctcaacccttgccgttaatgcgccaggtgcagatcgctgcgggtggtttaatattaatcggcgttgtactgggttataccgtaaatagcggtttcttcttattaagtggctttgttggtgccgggttactgtttgcaggaatcagcggtttttgtggaatggcaaggttgttagataagatgccgtggaaccaacgagcttgagaagcgacgccggacgcgccctagcagcgacatccggcctcagtaattagatcaggaaatcgtcgagagatttaccttctgccagcgcctgagcaattggcttcggtgtacggccctgaccggtccaggttttagtttcaccgttaacatcggtgaatttatatttcgccggacgcggctggcgttttttaccagcgcgtggtgcagcagcagagctattacccaataactcttccgggttaattccgtcagctttcatcagctccagccaggtgctaattttttcctggcgctctgccagttcacgctgctgctgttcttcttcttcacgtctttctttagtgacaaccctgaatttttcgagcatttcttcaagaacgtcaatggagaattcgcgagccatcgcacggagggtgcgaatgttatttaaactttgtaacattacggacataataaagaaaaccttttaacgccaaaacaaaaaaagtatttcgtcgcgtagtgtaagcgatcacttattatatttccacaaaatttaatctatttacagtcctgcgcgagattatttcagctgttattttctgaaactctcagaataatttcaagattatatattagccattttgatgagtaatttagattattggtgaacagagcggcgctctctgctcgctaattccgcaagcctgacaaaatcaaagtgaataaaaatgcaatataacagaataaaagaaaacatccatcactggtgctttctgctgttaatgtacattgtctggcataaaaaatgctgaaaatgacccagctactacatacaccgaattctctacgcttatagcgttacctcacccccaaactttcattagtgatattaaaggtaaggccatatctaattgatttaattaaaaataaatcatatcggcatgtaaaaatccacaatgtacaaaaaacgagccgttacggaatattttatctacaaaaactgactaaataaaaatttttcactaattgattagtcatagccagcgatatacgctatgcgaaaatgcagatggcaatgagatccactgctttcatctccattaacatcccattacgcttttattaaggagcattagcatgttctcaccgcagtcacgcttgcgtcatgcagttgcagatacgttcgcgatggttgtttactgttctgtcgtgaacatgtgtattgaagttttcctctccggaatgagcttcgaacagtctttttattccagattggtagcgattccggtgaacatcttaattgcatggccatacggtatgtaccgtgatctgtttatgcgcgcggcacgcaaagttagcccgtcgggctggataaaaaatctggcggatatcctggcttatgtgacgttccagtcaccggtgtatgtggcgatcttgttagtggtgggcgcagactggcatcagattatggcggcggtcagttcaaacatcgttgtttcgatgttgatgggggcggtttatggctacttcctcgattattgccgccgactgtttaaagtcagccgttaccagcaggtaaaagcctgactcttcttttcgcgactggcatcgccagtcgcgtctttaactggcttcgccaaataaaccattcaaataacgttcaagcgcaacacgcgaactaaagccatgcgggataccgtaatgctcgtgtcgctcgcctgctaaatagagcggaaattgctggtaatgatcgcaagttttaatatcggaagcgggttcagccagtgtcgaactgcgttcttttaatgttggatgaattaccagagcggtacgtcccattcgcgcttcgcgattaacatagacataattttccccacggcggtaaccatacgctttctgggttaccacatcgacagtaaaaccgactttttcaagtacgcgcgccacctcgtctggtcgtaaatacatatttgatcctcgttattatcaaccgcgggcctaccttacctgattgcgcattcacaacgctttcagaaaagtccataaagccgcgatgaacctcagttaagaaaattatggtctacactgaaaattacatcgaattctaatgggggatcatatgtttaaccgaccgaaccgcaacgacgttgatgatggcgtgcaggatatccagaatgatgtcaatcaattagctgacagcctcgaatctgtattgaagtcctggggcagcgacgccaaaggggaagctgaagccgcacgcagtaaagctcaggcattgctgaaagaaaccagggcgcgaatgcatggtcgtactcgcgtccagcaagccgcgcgcgatgccgttggctgcgcggattcttttgttcgtgaaagaccctggtgtagcgtgggtacagcagctgcggtaggtatttttatcggcgcactgttaagcatgcgcaaatcgtagtgcaaaaatgataataaatacgcgtctttgaccccgaagcctgtcttcggggtttctttttgcctggtgaatcacaaaaatccccctaccccgtcacgctcatatccagggtaatttcgaccactatttgctatatattgtgtggttgaatcttttttcaactacatctagtatctctgtatcaacagagagacaacccgacgcgtatcatcgcgccgtatcttcattttaaacggaaatacgaatcatgcgcattactatttacactcgtaacgattgcgttcagtgccacgccaccaaacgggcgatggaaaaccggggctttgattttgaaatgattaatgtcgatcgcgttcctgaagcggcagaagcgttgcgtgctcagggctttcgtcagttgccggtagtgattgctggcgatcttagctggtctggtttccgtccggacatgattaaccgtctgcatccagcgccacacgcggccagtgcatgagccagctcgtctacttctccagcagctccgaaaacacgcagcgttttatcgaacgtttaggtctgcccgcggtgcgcatcccgctcaatgagcgggaacggattcaggtagacgagccttacatcctgatcgtgccctcttacggcggcggcggtacggctggcgcggtgccacgacaggtaattcgctttttaaacgacgagcacaaccgggcgttgcttcgcggcgttattgcttctggtaatcgcaactttggtgaggcgtatggccgcgccggagatgtgattgcccggaaatgcggcgtgccgtggctgtaccgttttgaactcatgggtacgcaaagcgatatcgaaaacgttcgtaaaggagtaaccgaattttggcaacgacaaccgcagaatgcctgacgcaggaaacgatggattaccacgcgctgaatgcgatgcttaacctctacgatagcgcaggtcgcattcagttcgataaagaccgccaggccgttgacgcctttattgcgacgcatgtgcgtccgaacagtgtgaccttcagtagccagcagcagcgcctgaactggctggtcaacgaaggttactatgatgaaagcgttcttaatcgctactctcgcgactttgtcattacgctgtttacccacgcacacaccagcggttttcgtttccagacattcctcggggcatggaagttttacaccagctatacgttgaagacattcgacggtaaacgttatctggaagattttgccgatcgagtaacgatggtggcgctgacgctggcacaaggcgatgagacgctggcgttgcaactgaccgatgaaatgctgtcaggacgctttcagccagccacgccaacattcctcaactgcggtaagcagcagcgcggcgaactggtttcctgttttttgctgcgtattgaagacaatatggagtcgattggtcgggcggtaaattccgcactgcagctgtcgaaacgcggcggcggcgtagcatttttgctgtcgaatctgcgagaagcgggcgcgccaattaaacgtattgaaaatcaatcttctggcgtaattccggtgatgaaaatgctggaagacgcattttcctatgccaaccaactcggcgctcgtcagggggctggtgcagtctatttacatgctcatcatcccgatattctgcgttttctcgacacgaaacgggaaaatgccgacgaaaaaatccgcattaaaacactgtcgcttggcgtggtgatcccggatatcactttccatctggcaaaagagaatgcgcagatggcgctgttttcgccttatgacgtagagcgagtttatggcaagccgtttgccgatgtggccatcagccaacactatgacgaactggttgccgatgaacgcattcgcaaaaaatacctcaacgcccgtgatttcttccagcgactggcagaaatccagtttgagtccggctatccctacatcatgtatgaagacacggtaaaccgtgctaaccctatcgccgggcgcataaatatgagtaatctctgctcagaaattttgcaggttaacagcgcctcagagtatgacgagaatctcgactatacccgcacaggccatgatatttcctgcaatttaggttcgttgaatattgcgcacaccatggattcccccgattttgcccgcacggtagagactgccgtgcgcggtttaacggcagtatcagatatgagtcatatccgcagcgtgccgtccatcgaagccggaaatgccgcctcgcacgccatcggactggggcagatgaatttacacggctatctggcgcgagaaggcatcgcttatggttcgccggaagcactggatttcaccaatctctatttctatgccatcacctggcatgcactgcgtacctcgatgttgctggcacgcgaacgcggtgaaaccttcgccgggttcaaacagtcacgctatgccagtggtgaatattttagccaatatctgcaagggaactggcagccgaaaacggcgaaagttggcgaactgtttacccgtagcggtattacgttacctacccgtgagatgtgggcgcagctgcgcgacgacgtgatgcgctacggcatatacaaccagaatcttcaggcggtgccgccaaccggttctatctcttatatcaaccatgctacgtcgagtattcatccgattgtggcgaaagtagagatacgcaaagagggcaaaacaggacgcgtttactaccctgccccgtttatgactaacgagaatctggcgctgtatcaggacgcttacgaaattggcgcagaaaagatcatcgacacctacgcggaagcgactcgccatgtcgatcaggggctgtcgctgacgctttttttccccgataccgccaccactcgcgatatcaacaaagcgcagatttacgcctggcgcaagggtatcaaaacgctctattacatccgcctgcgtcagatggcgctggaaggcactgaaattgaaggctgcgtctcctgtgcactttaaggaatatctatgaaactctcacgtatcagcgccatcaactggaacaagatatctgacgataaagatctggaggtgtggaatcgcctgaccagcaatttctggctaccagaaaaggtgccgctgtcgaacgatattcctgcctggcagacattaactgtcgtagaacaacaactgacgatgcgcgtttttactggcctgacgctgctcgacacgctgcaaaatgttatcggcgcgccttctctgatgcccgatgcactcacgcctcatgaagaagcggtattatcgaatatcagctttatggaagcggttcatgcccgctcttacagttcgattttctcgacgctatgccagaccaaagatgtcgatgccgcctacgcctggagtgaagaaaacgcaccgttgcagcgaaaagctcagattattcagcaacattatcgcggtgatgatccgctgaaaaagaaaatcgccagtgtgtttcttgaatcttttttgttctattccggtttctggctgccgatgtatttttccagccgcggaaagctgaccaataccgcggacctgatccgtctgattatccgcgatgaagcagtccacggttactacataggctataaatatcagaaaaacatggaaaagatatctctgggacaacgtgaagagttgaagagtttcgccttcgatttgttgctggaactctacgacaacgagttgcaatacaccgatgagctgtacgccgaaaccccgtgggctgacgatgtgaaagcgtttctctgttacaacgccaataaggctttgatgaatctgggctacgaaccgttatttcccgcagaaatggcggaagtgaatccggcaatcctcgccgcgctttcgccgaatgccgatgaaaatcacgatttcttttccggttcaggctcctcttatgtgatggggaaagcggttgaaacagaagatgaagactggaatttctgagggtgttattttcaaaaatatcactacccgcagcagggaaataattcccgccaaatagctttttatcacgcaaataatttgtggtgatctacactgatactctgttgcattattcgcctgaaaccacaatattcaggcgttttttcgctatctttgacaaaaaatatcaactttctcgatttgctctcagcccttatatcacgggaaattccggcgatttgctcgcatcaatattcatgccacatttgccatcaggggttgcctcagattctcagtatgttagggtagaaaaaagtgactatttccattgggtaatatatcgacatagacaaataaaggaatctttctattgcatggcaattaaattagaaattaaaaatctttataaaatatttggcgagcatccacagcgagcgttcaaatatatcgaacaaggactttcaaaagaacaaattctggaaaaaactgggctatcgcttggcgtaaaagacgccagtctggccattgaagaaggcgagatatttgtcatcatgggattatccggctcgggtaaatccacaatggtacgccttctcaatcgcctgattgaacccacccgcgggcaagtgctgattgatggtgtggatattgccaaaatatccgacgccgaactccgtgaggtgcgcagaaaaaagattgcgatggtcttccagtcctttgccttaatgccgcatatgaccgtgctggacaatactgcgttcggtatggaattggccggaattaatgccgaagaacgccgggaaaaagcccttgatgcactgcgtcaggtcgggctggaaaattatgcccacagctacccggatgaactctctggcgggatgcgtcaacgtgtgggattagcccgcgcgttagcgattaatccggatatattattaatggacgaagccttctcggcgctcgatccattaattcgcaccgagatgcaggatgagctggtaaaattacaggcgaaacatcagcgcaccattgtctttatttcccacgatcttgatgaagccatgcgtattggcgaccgaattgccattatgcaaaatggtgaagtggtacaggtcggcacaccggatgaaattctcaataatccggcgaatgattatgtccgtaccttcttccgtggcgttgatattagtcaggtattcagtgcgaaagatattgcccgccggacaccgaatggcttaattcgtaaaacccctggcttcggcccacgttcggcactgaaattattgcaggatgaagatcgcgaatatggctacgttatcgaacgcggtaataagtttgtcggcgcagtctccatcgattcgcttaaaaccgcgttaacgcagcagcaaggtcttgatgcggcgctgattgatgcgccgttagcagtcgatgcacaaacgcctcttagcgagttgctctctcatgtcggacaggcaccctgtgcggtgcccgtggtcgacgaggaccaacagtatgtcggcatcatttcgaaaggaatgctgctgcgcgctttagatcgtgagggggtaaataatggctgatcaaaataatccgtgggataccacgccagcggcggacagtgccgcgcaatccgcagacgcctggggtacaccgacgactgcaccgactgacggcggtggtgctgactggctgaccagtacgcctgcgccaaacgtcgagcattttaatattctcgatccgttccataaaacgctgatcccgctcgacagttgggtcactgaagggatcgactgggtcgttacccatttccgtcccgtcttccagggcgtgcgcgttccggttgattatatcctcaacggtttccagcaattgctgctgggtatgcccgcaccggtggcgattatcgttttcgctctcatcgcctggcagatttccggggtcggaatgggtgtggcgacgctggtttcgctgattgccatcggcgcaatcggtgcctggtcgcaggcaatggtgactctggcgctggtgttaaccgccctgctgttctgtatcgtcatcggtttgccgttggggatatggctggcgagaagtccgcgagcggcgaaaattattcgtccactgcttgatgccatgcagaccacgccagcgtttgtttatctggtgccaatcgtcatgctatttggtatcggtaacgtgccgggcgtggtggtgacgatcatctttgctctgccgccgattatccgtctgaccattctggggattaaccaggttccggcggatctgattgaagcctcgcgctcattcggtgccagcccgcgccagatgctgttcaaagttcagttaccgctggcgatgccgaccattatggcgggcgttaaccagacgctgatgctggccctttctatggtggtcatcgcctcgatgattgccgtcggcgggttgggtcagatggtacttcgcggtatcggtcgtctggatatggggcttgccaccgttggcggcgtcgggattgtgatcctcgccattatcctcgatcgtctgacgcaggccgttgggcgcgactcacgcagtcgcggcaaccgtcgctggtacaccactggccctgttggtctgctgacccgcccattcattaagtaactctgcacttgcccggtgacgccgggcattatcaccctgccaaaaaaaggaataacaatgcgacatagcgtactttttgcgacagcgtttgccacgcttatctctacacaaacttttgctgccgatctgccgggcaaaggcattactgttaatccagttcagagcaccatcactgaagaaaccttccagacgctgctggtcagtcgtgcgctggagaaattaggttataccgtcaacaaacccagcgaagtagattacaacgttggctacacctcgcttgcttccggcgatgcaaccttcaccgccgtgaactggacgccactgcatgacaacatgtacgaagctgccggtggcgataagaaattttatcgtgaaggggtatttgttaacggcgcggcacagggttacctgatcgataagaaaaccgccgaccagtacaaaatcaccaacatcgcacaactgaaagatccgaagatcgccaaactgttcgataccaacggcgacggaaaagcggatttaaccggttgtaaccctggctggggctgcgaaggtgcgatcaaccaccagcttgccgcgtatgaactgaccaacaccgtgacgcataatcaggggaactacgcagcgatgatggccgacaccatcagtcgctacaaagagggcaaaccggtgttttattacacctggacgccgtactgggtgagtaacgaactgaagccgggcaaagatgtcgtctggttgcaggtgccgttctccgcactgccgggcgataaaaacgccgataccaaactgccgaatggtgcgaattatggcttcccggtcagcaccatgcatatcgttgccaacaaagcctgggccgagaaaaacccggcagcagcgaaactgtttgccattatgcagttgccagtggcagatattaacgcccagaacgccattatgcatgacggcaaagcctcagaaggcgatattcagggacacgttgatggttggatcaaagcccaccagcagcagttcgatggctgggtgaatgaggcgctggcagcgcagaagtaatttttattcgggcggataaggcgtttttgccgcatccgccgttctgtgcacaatgcctgatgcgacgctggcgcgtcttatcatgcctacaaaccacatcgcacatttcaacaatctatctttcatcccatattcatcaacatccgctattattgatttccagcttaatcatcacctgatgaacaaaaataatgactaaacctaatcatgagcttagcccggcgctgatcgtgctgatgtctatcgccaccggtctggcggtagccagtaactattacgcccagccattgctcgacaccatcgcgcgtaacttttccctttccgccagttcggcaggctttattgttaccgccgcgcagttgggctatgccgcaggtctactgtttcttgttcccctcggtgatatgtttgaacgccgccgcctgattgtctcgatgaccttactggcggcatgttgattaccgccagcagtcagtcgctggcgatgatgatcctcggtacggcattaaccggtttattctcagtcgtggcacaaattctggttccgctggcagcgacgctggcttcaccggataaacgcggcaaagtggttggcactattatgagcggtctgctgttggggatcttgctggcacggacagttgccggattgctggcgaatctcggcggctggcgcaccgtcttttgggttgcttcggtgttaatggcactgatggcgctggcattatggcgtggtctgccacaaatgaaatcagaaacccacctcaactacccacagttgttgggttccgttttcagtatgtttatcagcgataaaattctgcgtacccgcgcgttgctgggctgcctgacctttgccaatttcagcattctctggacctcaatggcctttttgcttgccgctccaccttttaactacagcgatggtgtcattggtctgtttggacttgcgggagctgccggagcgttgggcgctcgtccggcgggcggttttgccgataagggcaaatcgcaccacaccacaactttcggtctgctgctgctattactttcatggctggcgatctggtttggtcacacttccgtactggcgttgattatcggaatcctggtgctggatctcaccgtgcagggcgtgcatatcactaaccagacggtaatttatcggatacatcctgatgcgcgcaatcgcctgaccgcaggttacatgactagctactttattggcggtgccgccggttcgctaatttcagcctcagcctggcaacatggcggttgggctggcgtttgtctggctggcgcgacgattgccctggttaacttactggtctggtggcgaggttttcatcgtcaggaagccgcaaattaagcaatcagcaaccgttttcgtggctttacacttataagggtgttaagaagcccatcagtctgataaggttaagatattcattcagtctatttataatattaacaatcgttaagcgtacactctatggaaagccctactccacagcctgctcctggttcggcgaccttcatggaaggatgcaaagacagtttaccgattgttattagttatattccggtggcctttgcgttcggtctgaatgcgacccgtctgggattctctcctctcgaaagcgtttttttctcctgcatcatttatgcaggcgcgagccagttcgtcattaccgcgatgctggcagccgggagtagtttgtggattgctgcactgaccgtcatggcaatggatgttcgccatgtgttgtatggcccgtcactgcgtagccgtattattcagcgtctgcaaaaatcgaaaaccgccctgtgggcgtttggcctgacggatgaggtttttgccgccgcaaccgcaaaactggtacgcaataatcgccgctggagcgagaactggatgatcggcattgccttcagttcatggtcatcgtgggtatttggtacggtaataggggcattctccggcagcggcttgctgcaaggttatcccgccgttgaagctgcattaggttttatgcttccggcactctttatgagtttcctgctcgcctctttccagcgcaaacaatctctttgcgttaccgcagcgttagttggtgcccttgcaggcgtaacgctattttctattcccgtcgccattctggcaggcattgtctgtggctgcctcactgcgttaatccaggcattctggcaaggagcgcccgatgagctatgaggttctgctgcttgggttactagttggcgtggcgaattattgcttccgctatttgccgctgcgcctgcgtgtgggtaatgcccgcccaaccaaacgtggcgcggtaggtattttgctcgacaccattggcatcgcctcgatatgcgctctgctggttgtctctaccgcaccagaagtgatgcacgatacacgccgtttcgtgcccacgctggtcggcttcgcggtactgggtgccagtttctataaaacacgcagcattatcatcccaacactgcttagtgcgctggcctatgggctcgcctggaaagtgatggcgattatataacccacaagaatcatttttctaaaacaatacatttactttatttgtcactgtcgttactatatcggctgaaattaatgaggtcatacccaaatggatagttcgtttacgcccattgaacaaatgctaaaatttcgcgccagccgccacgaagattttccttatcaggagatccttctgactcgtctttgcatgcacatgcaaagcaagctgctggagaaccgcaataaaatgctgaaggctcaggggattaacgagacgttgtttatggcgttgattacgctggagtctcaggaaaaccacagtattcagccttctgaattaagttgtgctcttggatcatcccgtaccaacgcgacgcgtattgccgatgaactggaaaaacgcggttggatcgaacgtcgtgaaagcgataacgatcgccgctgcctgcatctgcaattaacggaaaaaggtcacgagtttttgcgcgaggttttaccaccgcagcataactgcctgcatcaactctggtccgcgctcagcacaacagaaaaagatcagctcgagcaaatcacccgcaaattgctctcccgtctcgaccagatggaacaagacggtgtggttctcgaagcgatgagctaacgcgtcatctcgctcaaaaatccagatttataaaagaaaaaatgactggccagcatcgcaacatgctggcctttttggcaagcaggtcggctcagccgatgagttaagaagatcgtggagaacaatatgagcgcaaatgcggagactcaaaccccgcagcaaccggtaaagaagagcggcaaacgtaagcgtctgctcctccttctcaccttgctctttataattattgccgtagcgatagggatttattggtttttggtactgcgtcacttcgaagaaaccgatgacgcatacgtggcagggaatcaaattcaaattatgtctcaggtgtctggcagcgtgacgaaagtctgggccgataacaccgattttgtaaaagaaggcgacgtgctggtcactctcgacccgacagatgctcgccaggcgtttgaaaaagccaaaactgcactggcttccagcgttcgccaaacccaccagctgatgattaacagcaagcagttgcaggcgaatattgaggtgcagaaaatcgccctcgcgaaagcacaaagcgactacaaccgccgtgtgccgctgggcaatgccaacctgattggtcgcgaagagctgcaacacgcccgcgacgccgtcaccagtgcccaggcgcaactggacgtcgcgattcaacaatacaatgccaatcaggcgatgattctggggactaaactggaagatcagccagccgtgcaacaggctgccaccgaagtacgtaacgcctggctggcgctggagcgtactcgtattatcagtccgatgaccggttatgtctcccgccgcgcggtacagcctggggcgcaaattagcccaacgacgccgctgatggcggtcgttccagccaccaatatgtgggtggatgccaactttaaagagacgcagattgccaatatgcgtatcggtcagccggtcactatcaccacggatatttacggcgatgatgtgaaatacaccggtaaagtggttggtctggatatgggcacaggtagcgcgttctcactgcttccagcgcaaaatgcgaccggtaactggatcaaagtcgttcagcgtctgcctgtgcgtatcgaactggaccagaaacagctggagcaatatccgctgcgtatcggtttgtccacgctggtgagcgtcaataccactaaccgtgacggtcaggtactggcaaataaagtacgttccactccggtagcggtaagcaccgcgcgtgaaatcagcctggcacctgtcaataaactgatcgacgatatcgtaaaagctaacgctggctaatccagaggtgcgtgtgatgcaacagcaaaaaccgctggaaggcgcgcaactggtcattatgacgattgcgctgtcactggcgacattcatgcaggtgctggactccaccattgctaacgttaattaataataaatcgccgggaatctgggctcatcgctcagccagggaacgtgggtaatcacttctttcggggtggcgaatgccatctcgatcccgcttaccggctggctggcaaagcgcgtcggggaagtgaaactgttcctttggtccaccatcgcctttgctattgcgtcgtgggcgtgtggtgtctccagcagcctgaatatgctgatcttcttccgcgtgattcaggggattgtcgccgggccgttgatcccgctttcgcaaagtctattgctgaataactacccgccagccaaacgctcgatcgcgctggcgttgtggtcgatgacggtgattgtcgcgccaatttgcggcccgatcctcggcggttatatcagcgataattaccactggggctggatattcttcatcaacgtgccgattggcgtggcggtggtgttgatgacactgcaaactctgcgcggacgtgaaacccgcaccgaacggcggcggattgatgccgtggggctggcactgctggttattggtatcggcagcctgcagattatgctcgaccgcggtaaagagctggactggttttcatcacaggaaattatcatccttaccgtggtggcggtggtggctatctgcttcctgattgtctgggagctgaccgacgataacccgatagtcgatctgtcgttgtttaagtcgcgcaacttcaccatcggctgcttgtgtatcagcctcgcgtatatgctctacttcggcgctattgttctgctgccgcagttgttgcaggaggtctacggttacacggcgacctgggcaggtttggcctctgcgccggtagggattattccggtgatcctgtcgccgattatcggccgcttcgcgcataaactggatatgcggcggctggtaaccttcagctttattatgtatgccgtctgcttctactggcgtgcctatacctttgaaccaggtatggattttggcgcgtcggcctggccgcagtttatccaggggtttgcggtggcctgcttctttatgccgctgaccaccattacgctgtctggtttgccaccggaacgactggcggcggcatcgagcctctctaactttacgcgaacgctggcggggtctatcggcacgtcgataaccacgaccatgtggaccaaccgcgagtcgatgcaccatgcgcagttgactgagtcggtaaacccgttcaacccgaatgcccaggcgatgtacagtcaactggaagggcttgggatgacgcaacagcaggcatcaggctggattgcccagcagatcaccaatcaggggctgattatttccgccaatgagatcttctggatgtcagccgggatattcctcgtcctgctggggctggtgtggtttgctaaaccgccatttggcgcaggtggcggcggaggcggtgcgcactaagtacaactaagccagttcatttgaactggcttttttcaattaattgtgaagatagtttactgactagatgtgcagttcctgcaacttctctttcggcagtgccagttcttcgttgctgttgatgcgtacgtcacgttccagaatgctacgcgcaatatcctgcgcttcctgcaacgagtgcatctggtaagtgccacactggtagacgttcagttccgggatctgattctgatcctgcactttcagcacgtcttccattgccgctttccaggcatcagcaacacgctgctcatctggcgtaccaatcagactcatataaaaaccggtgcggcagcccattggcgagatatcgataatctctacaccattaccgttaagatggttacgcataaaaccagcaaacaggtgctccagggtatggatccctctttctggcatcacttctttgttcggcacgcagaagcgcagatcgaacacggtgattgcgtcgccatgcggggtgttcattgttttcgccacccgaactgcaggcgcttccatccgggtatgatcgactgtgaagctatctaacaacggcatttagccacctccggtaatttttttaaaaattttctgaactctttcttcccaggcgagtctgagtatatgaaagacgcgcatttgttatcatcatccctgaattcagagatgaaattttggccactcacgagtggcctttttcttttctgtcaggcgtgtttttccagccacaccgcaaacggttcggtatcagcggcttccatttcctgctgacggcgttcagacgcctcgcgctcggctacaaaatcctcttcgcgcagaatttccagcggctcttcacgcagcagattacggtaggcttctgcaaatgctttgcctgttccgccaataccagtatcaatcatagaccttaagatacgggcagagaaagtcagatcgggattatcgaagcaggcaaccagttcatcacacactttctgatacgcttcgccgccgttaatactatccagcgtttgcgcgacgcgtttcagatcgcggaacagatctttacccacctgcggtaacgggaactgtgcggtttcgcagccgatacccagcgtcagacccggtttgcgaccttcgaggatcacccggttccagttaacgcgtgtacaggcaagttcgctactgctcatttccggtgcatcagccagcgcacaccagaccataaacaggtcgaggaatcgcacctgctgttcatctacaccaatcggcgagaacgggttgatgtccagcgaacgcacttcaatatattcaatgccgccacgtaacagcgcatcagaaggcgactcgccgctgcgggtaacgcgttttggacgaatcggcgcgtacagttcgttttcaatctgcaacacgttgctgttgatttgcagcctcttaccgtctttctcaataccaatcttcgcgtactcttccgatggcgttttgattgcctgtttaaggcccgctacgtactcgtaaagatcgttgaaggtaataccaagattgctttgcgatttattggtatagccgagatcgctcaaacgaagagaggtcgcatacggcaggtaatacataccgcactcggttttctcaaacggcagcgacgttggttttccttgcaggaaagaagaacaaatcgccggagatgcaccaaacagataaggaatgacccaaccgaaacgatagtaattgcggataacgcggaaatagcccgcagaaattttctctttggcatcagcgcccgagatatcaccgcacttcgcttgccagaatgccattggcaaagagaaattgtagtgcacgccggaaatggtttgcatcagcgcgccgtagcgatttttcagcccttcacgatacagcgttttaaagcgtccggtgttagaagtgccgtactgtgccagttcgatgtcctgaccttctgcgatgtagcatggcatacttaacggccacatccgctcatcgcccatattgcgcgccgtataacgatgcagatcgcgcataaaggtcagcatatgttcaatatcaccatccactggtgtaatgaattccagcaatgcttccgcaaaatcggtagtaatccatttgtgcgtcagtgcggaacctaatgcttcaggatgacctgttgttgccagtgtgccatcagcattaacacgcaaagtttcgcgctccagcccacgctgtatcccctttaacgcctgaggatgtttttccagccaggccagcgcctgtgatacgtccgggatcaaattgacctcccgcctgtcaaaatcgttttaattagcataactgtaatggtgaccatatgtgcaggcctacaattagtgccaccacatcatgccctgaacggtcgctgctgcaactgcaacatagcgtaacgctttaccaaggcacaaaaaaaagattaccggtccccacgagatgcgcatccatcccgctaacagacacagtaaatcgccaaccacgggcatccagcttaataatagcgtgactgcaccatagcgtttcagccagccggtagctttctcttgccagcgcgatgttttacgcaatggaaagaaacgcccaaggataacgttagttaaccctccaaggctattacccattgttgctgttaaaactaaaacccagggatgactgatcccggaaagcaacattgccaccagcacgacttcggagttgccgggtaatagtgtagcgctgagaaaactactggcaaacaacgagaaaagcgataacgcttcactcacagcaagcgaacatccacggcgtccatgcctgctgcacgggccgcctgaataccgaaatcggcatcttcaaagaccacacactgcgtcggttgcacgcccatacgctgcgcgcacaacaaaaatgtgtctggcgcgggtttatggtgtttgacgtgatcggcagcgacgacggcgtcaaaataatggcgtaatcccaggtgcgccagcaatgcctcagcgatggcgctttcactccccgttcctacagccattgggcgacgaccatgccaacttttcaccacatcaacaagaggaagcggttcgacgctatccagcagcatacttcttactgcttctgttttttcacgcgctaacgcatgcgggtcgagatcggcctgattcagctcaataattgcctgagcaatacgccaggtgggcgatccattaagcgcaatcatcgcctgaatatcgtactgaagaccgtagtgccctaatacttcgcgccacgctttacggtgcgtaggctccgtatccaggattgtgccatccatatcaaaaattaaacctgcataacgctcgtacatggtcttctcgcaagtcgaaaaatatgacgctactttagcgtaattgcttgattttgtcgctgatggcgaaggagaagaaaattcaggaaatggataaaggagttatttagaaatgagatatttttgaaggaaattttttggagaagatggtgcatccgggaggatgactcactgacgttcgcccttcgggccgttgctggcgcaacgttatccttcctggtgcctgcggttaataccgctatctcttcgataccttcattgctgaaggttacggagaatatggtgcatccgggaggattcgaacctccgaccgctcggttcgtagccgagtactctatccagctgagctacggatgcatcgggaaaacttattctactgctgatattgataccgctactaaagccatatcaattaagagatggtgcatccgggaggattactcgccttgcggctcgcccttcgggccgttgctaaagcaacgttatcatccctagtgcctgcggttaattccgctacctcttcgataccttcattgctgaagatttcggagaatatggtgcatccgggaggattcgaacctccgaccgctcggttcgtagccgagtactctatccagctgagctacggatgcatcgggaaatttattttactgctgatattgataccgctactaaagccatatcaagtaagagatggtgcatccgggaggattcgaacctccgaccgctcggttcgtagccgagtactctatccagctgagctacggatgcatcgggaaacttactttactgcagattttttgataccgctactaaagccgtatcaagtaagagatggtgcatccgggaggattactcgccttgcggctcgcccttcgggccgttgctaaagcaacgttatcctccctggtgcctgcggttattaccgccacctcttccataccttcatcgctgaaagtacgtagaatatggtgcatccgggaggattcgaacctccgaccgctcggttcgtagccgagtactctatccagctgagctacggatgcaaatggcggtgaggcggggattcgaaccccggatgcagcttttgaccgcatactcccttagcaggggagcgccttcagcctctcggccacctcaccacacgcctcttacgagtgcttcgaagaacttgtttatcgctcatcgtcgctgcgtggcgcacatattactttctgagacttataagtcaaacaatttttcctacacttttatcgtttgcacacttcacgttcaattagtctgtaaaaacgtcaaaaagagtgttttatcaacagaagaatggaggtctgacagatagtagtaatgcaaaaaaatggagacttaagttgaatgaacgggagtaaagcgaaaagactatagagtgaaggagaaattttgagggtgcgtctcaccgataaagatgagacgcggaaagattagtaactggactgctgggatttttcagcctggatacgctggtagatctcttcacggtgaacagaaacttccttcggggcatttacgccaatacgtacctggttgccctttacccctaaaactgtcacggtgacctcatccccaatcatgagggtctcaccaactcgacgagtcagaatcagcattctttgctccttgaaagattaaaagagtcgggtctctctgtatcccggcattatccatcatataacgccaaaaagtaagcaatgacaaacacattacatctaagcagtcatggcattacattctgttaaacctaagtttagccgatatacacaacttcaacctgactttatcgttgtcgatagcgttaatgcgaatgccgtgaagcgagtccacggcattgcctgacgcttatattattgcaatttcgcgctgacccagcctttcacactggctaacgctgcaggtaaggccgcagcatccgtaccaccggcttgcgccatgtcaggacgtccaccacccttgccgcccacctgctgagcgaccataccaatcagttcccctgctttcacacgatctgtgacgtccttagatacgcctgcaatcagagaaaccttaccttcgactaccgttgccagcacgataattgtcgaccccagctgattttttaaatcgtcaaccatggtacgcaacattttcggctcaacaccgctaagctcgctaaccaacagcttaacaccattaacatcaattgccttactggaaagatttgcgctctcctgtgcggcagcttgttctttaagctgttgtaactctttttccagctgacgcgtacgttccagtactgagcgcactttatcagccagattattgctatcgcctttcagcagatgcgcgacttcgcttaagcgatcgctgtctgcatgaacggtggcgatagcaccttctccggttaccgcttcgatacgacgaacgcctgcagcagtacccgattcagagatgatgcggaacagaccaatatcaccagtgcggctggcgtgagtaccgccacacaactcggtagagaaatcgcccatgctcagcacgcgtacgcgctcatcatacttctcgccgaacagcgccatcgcacctttcgctttcgccgcttcgagatccatgatgttggtttcgatcggcaaattgcgacgaatctgtgtgttcaccaggtcttcgaccgcacgaatctcttctggtttcatcgcttcgttgtgtgagaagtcgaagcgcagcaccttgtcgttaaccagtgaacctttctgcgatacatgagtacccagaacctggcgcagcgcagcgtgcatcaggtgcgttgcggagtgattcagacgaatacgggcgcgacgagcctcatcaacatcagcctgcaccgcgtcgcccactttcagagaacccgcagcaagtttaccgatgtgaccaatcgcctggccgtatttctgcgtatcttccaccgcaaaggagaagttagcgcctttcagttcgcctttatcgccaacctgaccgccggattccgcatagaatggcgtttgatccagcacgaccacagcttcctggcctgcattgatggcatcaaccgctttaccatcaacaaacagcgcagtcactttgccgttcagttccagatggtcatagcctttaaattcagatgcactgtcaacacggatcattgcgttgtaatcggcaccaaagccgctggcttcgcgcgcgcgacgacgctgctcttccattgcagcttcaaaaccagcttcgtcaactttgatgttgcgctcacgacaaacatcagccgtcaggtcaaccgggaagccataggtgtcgtacagacggaaagcagtttcaccatccagcgtatcaccagaaagttttgccagctcttcatccagcaacgccagaccgcgctccagagtacgagcaaactgctcttcttcagtcttcagcacctgctcaacctgcgcctgctggcgtttcaggtcttcacccgcagagcccataacgtcgatcagcggaccaaccagtttgtagaagaaggtttctttcgcgccgagcatattaccgtgacgcactgcgcgacgaatgatacgacgcagtacataaccacggttttcattggacggcattacgccatccgcgatcaggaacgcacaagaacgaatgtggtcagcgattacgcgcagcgatttattgctcagatcggttgcgccagtgactttcgctaccgcctggatcagcgtgcggaacaggtcgatgtcatagttagagttaacgtgttgcagcaccgcagcaatacgctccagacccataccggtatctacagacggcttcggcagcggttccatcgtgccatcggcctggcggttgaactgcatgaagacgatgttccagatctcaatgtagcggtcgccgtcttcttccgggcttcccggagggcccccccaaatgtggtcgccgtgatcgtagaagatttcggtgcacgggccgcacggaccagtgtcacccatctgccagaagttgtcagatgcgtatggcgcacctttgttatcgccgatgcgaataatacgttcgcgcgggatccctacttctttttcccagatttcgtaggcttcgtcgtcgctttcatagacggtaacccacagacgctctttcggcagggcaaaccatttttcgctggtcagcagttcccatgcaaactgaatggcatcgtgtttgaaatagtcgccgaagctgaagttgcccagcatttcgaagaaggtatggtgacgcgcggtgtaaccgacgttttccaggtcgttgtgtttaccacccgcacgcacgcagcgttgggaagtggtagcgcgggaataattacgcttgtcgagcccaaggaacacatccttgaactggttcatcccggcgttggtaaacaacaaagttgggtcgttatggggtaccagggagctgctggcaactacctgatgtcccttactatggaaaaagtcgagaaacgcctgacggatctcagcggtgctcttgctcataattatcctgaaatcaagctaacgaaatatcgccaccagctccagcgtgtcttaaccgccgggctggtaactgaaaagtgggaataagataagttttcttgactgggaagtaaaataccgtatgcgttcagtcggcaaaatttcgccaaatctcctggatatcttccatcagatagccacgatagagcagaaaacgctggatcttaactttttctgaaaagacagttggcaaaggttcgccatattttcgcgtcgcctgatcgcgcgccagtgcgcaccagtcgatgtcacattcacgcatcgctttttctgtcgcttcgcgggaaatacctttctgattcagttcctggcgaatacgcgcaggtccataacctttgcggctacggctggcgataaagcgcgcaacaaatcggctgtcatcgagatagccatgttcatggcaccaggcaataacgcgctcgtaatcttctgccgtagcatcaatctcttctgggccatttttgcccataatcggtgccgcgagtttacgtcgcagttcttgctcactgtgatcgcgcaccgccagaatgcgtaccgcacgatccaacaggcgagcatatgccgggcgacgggatgttgattctgtcatggcatatccttacaacttaaaaaagcaaaagggccgcagatgcgacccttgtgtatcaaacaagacgattaaaaatcttcgttagtttctgctacgccttcgctatcatctacagagaaatccggcgttgagttcgggttgctcagcagcaactcacgtactttcttctcgatctctttcgcggtttccgggttatctttcagccaggcagtcgcattcgctttaccctgaccgatcttctcacctttgtagctgtaccacgcgcctgctttctcgatcagcttctcttttacgcccaggtcaaccagttcgccgtagaagttgataccttcgccgtagaggatctggaattcagcctgtttaaacggcgcagcgattttgttcttcaccactttcacgcgggtttcgctacccaccacgttttcgccctctttcaccgcgccgatacgacggatgtcgagacgaacagaggcgtagaatttcagcgcgttaccaccggtagtggtttccgggttaccgaacatcacaccaattttcatacggatctggttgatgaagatcagcagcgtgttggactgcttcaggttacccgccagcttacgcatcgcctggctcatcatacgtgccgcaaggcccatgtgagagtcgccgatttcgccttcgatttccgctttcggcgtcagtgccgccacggagtcaacgacgataacgtctactgcgccagaacgcgccagggcgtcacagatttccagtgcctgctcgccggtgtccggctgggagcacagcaggttgtcgatatcgacgcccagtttacgtgcgtagattgggtccagcgcgtgttcagcatcgataaacgcacaggttttaccttcacgctgcgctgcggcgatcacctgcagcgtcagcgtggttttaccggaagattccggtccgtagatttcgacgatacggcccatcggcagaccacctgccccaagcgcgatatccagtgaaagcgaaccggtagagatggtttccacatccatggaacggtcttcacccaggcgcatgatggagcctttaccaaattgtttctcaatctggcccagtgctgccgccaacgctttctgtttgttttcgtcgatagccatttttactcctgtcatgccgggtaataccggatagtcaatatgttctgttgaagcaattatactgtatgctcatacagtatcaagtgttttgtagaaattgttgccacaaggtctgcaatgcatacgcagtagcctgacgacgcaccgcatcacggtcgccgctgaagcattcccgccgggtaatgccttcaccgcgggcagtggcaaaagcaaaccagacggtgccgacaggcttctcttcactgccgccatccggcccggcgataccactaatagacacggcataatcagcacgagccgctttcagtgcgcctatcgccatttccaccacgacgggttcactcaccgcgccatgctgcgccagcgtctcttcgcgtacgccgatcatctgcgctttggcttcgttactgtaggtgacaaatccgcgttcaaaccaggcggagctaccggcaatatcggtaatcactttcgctacccaaccaccggtacaagactcggcagttgttacggttgcgccacgggctttcagcgcctgcccaacctgttcacttaactgcatcagttcactgtcagtcatcacaacctctgtcagtcaaaaatttatgccggacaagatagcactttcgtcaggaagatggtgttggcgttgcaattttacgaggaggattcagaaaaaagctgattagccagagggaagctcacgcccccctcttgtaaatagctactgtactcgcgccagcgccacggcttgtcctaactgccagaccgccattgcgtaatgggtgctgtggttgtaacgggtgatggtgtagaagttcggcagaccgtaccagtactggtagccggtgccaacatccagacgcagcaggctggcttgttgatggttgcccagcggctgctgtggcgttaaacctgcggcggcaagctgcgaaatgctgtacttagttttgaagccatttggcaagcctggagcctgaccgtttgccattaccgcgacctgatcgcctttcacccagccgtgcgctttgaaatagttcgccacgctaccgatcgcatcaaccggatcccacaggttgatatgcccgtcgccgctgaaatctaccgcatattgtttgtaagacgacggcataaactgtccgtagcccatcgccccggcaaaggaacctttcagattgagcggatcgtcctgctcgtcgcgcgccatcaacaggaaggtttccagctcgccagagaaatactccgcgcggcgtgggtagttaaatgacagcgttgccagcgcatcgaggatgcgagttttccccatcacgcgcccccagcgggtttcaacgccgataatcccgacgataatttccggcggtactccatacacctgccacgcgcgattcaacgcatcttcatactgattccagaaaaccacaccgttctgcacgttgtccggcgtaataaattttttgcgataacggagccatgcgccgttcggacctgatggcggtttcaccgatgtggttggtgcctggttatccatcagccgcagtaccgaatccagacgcttcgcctgggagagaatttcctgcaactgctgacgatcgaaaccgtgtttgttcaccattttgtcgatgaactgctgggcattcgggttattagcgaaatcgccgcccatctgcatcacattgtgctgcggctcaagcaggaagccgccagacggcgttccggtggtcgtatcagtctcagtaggttttggcttgctgctacaggcggcaagcaacacaaaaaggggaagcaatgttacataacgacgcttgaacatgaggggtccatttaacagattcaaccaggggcaagtatggtaaagcatcacgccccgcacaaggaagcggtagtcactgcccgatacggactttacataactcaactcattcccctcgctatccttttattcaaactttcaaattaaaatatttatctttcattttgcgatcaaaataacacttttaaatctttcaatctgattagattaggttgccgtttggtaataaaacaataaatcctgaaggagagaacaatgatagaaaccattactcatggtgcagagtggtttatcgggctgttccaaaagggcggagaggtgtttaccgggatggtgaccggcattcttccgctgttgattagcctgctggttatcatgaacgcactgattaattttatcggtcagcatcgtattgaacgttttgctcaacgttgcgccggtaaccctgtttcccgttacctactgttaccgtgcattggcacgtttgtcttttgcaatccgatgaccctaagcctgggtcgctttatgccggaaaagtacaaacccagctactacgcggcggcctcttatagctgccactcaatgaatggcctcttcccccatatcaaccctggcgaactgtttgtttatcttggcattgccagcggtctgacaacgctgaacctgccacttggcccactggcggtgagttatctgctggttggtctggtcaccaatttcttccgcggctgggtgaccgatctgaccaccgccatttttgagaaaaagatgggcattcaacttgaacaaaaagttcacctggcaggagcaacatcatgacgcatattcggatcgaaaaaggaacgggtggctggggcggcccgcttgagctgaaagccacgccgggaaaaaaaatcgtctatatcaccgccggtacccggcctgcgattgttgacaaactggcacagcttactggctggcaggctattgacggatttaaagaaggtgaacccgcggaggcggaaattggtgtcgcggtaatcgactgtggcggcacattacgctgcggcatctatccgaaacgacgtattcccaccattaatatccactcgacgggcaagtccggtccgctggcgcagtacattgtggaagatatttatgtctctggcgtaaaagaagaaaacatcactgtagtaggtgatgcgacaccacaaccctcttccgtgggccgtgactatgacaccagtaagaaaatcaccgaacaaagcgatggtttactggcgaaggtgggaatgggcatggggtccaccgttgcggtgctgtttcaatctggtcgtgacaccatcgacactgtattaaaaaccattctgccgtttatggcattcgtctcggcgctcattggcatcattatggcttctggccttggtgactggattgcccacggtcttgctccgctggcgagccatccactgggtctggtcatgctggcgctcatctgttccttcccactgctttcacctttcctcggcccaggcgcagttatcgcacaggttatcggcgtattgattggcgtgcagattggtctcggcaatattccgccgcatctggctttaccggcactgtttgccatcaacgcgcaggcggcctgcgacttcatcccggtcggtttgtcgctggcggaagcccgtcaggacacggttcgcgtcggtgtcccttctgtactggtgagccgctttttaaccggcgcgccgactgtactgatcgcctggtttgtctccggttttatctatcaatagaggctgaaacatgaccgttatttatcagaccaccatcacccgtatcggcgcgagtgccattgacgccctcagtgaccagatgctcatcacctttcgtgaaggcgcgcctgcggacctcgaagagtattgcttcattcattgccacggcgagttgaaaggtgcactccatcccggtttgcaattttcactcgggcagcatcgctatccggtgaccgctgttggcagcgtggcggaagacaaccttcgcgaactgggtcatgtcaccctgcgcttcgatggtttaaacgaagcggaatttccgggcactgtccatgtggcaggccctgtccccgacgatatcgcgccgggatcggttttgaagtttgaatctgttaaggagtaaaaaatgaatcaggttgccgttgtcatcggtggtgggcaaaccttaggcgcgttcctgtgccacggtctggctgccgaggggtatcgcgtcgcggttgtcgatattcagagcgacaaagccgcaaatgtggcacaagaaattaacgccgaatatggtgaaagtatggcgtacggttttggtgctgacgccactagcgagcaaagcgttctggcgctctctcgtggggtagatgaaatctttggtcgcgtggatttgctggtctacagcgccggaatagcaaaagcagcctttatcagcgacttccagctcggcgattttgaccgttcgctacaggtgaatctggtgggttatttcctgtgtgcgcgtgaattttcgcgtttgatgatccgcgacgggattcaggggcgcattattcagatcaactcgaaatccggcaaagtgggcagcaaacacaactctggctacagcgcagcgaaatttggtggcgtcgggctgactcaatcactggcgctggatctggcggagtacggcattacggtgcattcactgatgctcggtaacctgctgaaatcgccgatgttccagtcactgttgccacaatacgcgaccaagctgggtatcaaaccggatcaagtcgagcagtattacatcgacaaagtaccgctcaaacgcggctgcgattatcaagatgtgctgaatatgctgctgttctacgccagtcctaaggcgtcgtactgcaccggacagtcgatcaatgtcaccggcggtcaggtgatgttctgatcaacagcggagatccattaaggatctccgtgagactatagaatgcctgatgcgctacgctcatcaggcatacaggacttccgccactacattaaggaaaagttatggtatccgcactcatcaccgtcgccgttatcgcctggtgtgcgcaactggccttaggcggctggcaaatttctcgttttaaccgtgccttcgacacactatgccagcaagggcgggttggcgtgggccgttccagcgggcgctttaaaccgcgggtcgtggtcgccatcgcgctggacgatcagcagcgcatcgtcgacaccttgtttatgaaaggactgaccgtcttcgcccgaccgcaaaaaattcccgcaattaccggtatgcatgcgggtgatttacagcccgatgtgatctttccccatgatccactatcacagaatgctctatcattggcgcttaaactgaaacgtggataatttcgttgtgaatgttacttgcttgcgaagttatcattttgaaacctaaatcaggtaatcacgcccatgaaacctcgtcagcgtcaggccgccattctggagtatctgcaaaagcagggtaaatgctcggttgaagaattggcgcaatactttgacaccacaggcacaaccattcgcaaagatctggtcattctggaacatgccggaaccgtcattcgtacttatggcggagtggtgttgaataaagaggaatccgatccgcctatcgatcataaaacactcatcaacacccacaagaaagagctgattgcagaagctgccgttagttttatccatgatggcgattcgatcattcttgatgctggcagtaccgttttgcagatggttcccctgctctcgcgctttaataacatcacggtgatgaccaacagcctgcatatcgtcaatgcgctatccgaactggataacgaacaaactatcctgatgccaggcggaacgtttcgcaaaaaatcggcctcatttcacgggcaactggcagagaatgccttcgagcatttcaccttcgataaattgtttatgggcaccgacggcatcgatctcaatgcgggcgtaaccacctttaacgaggtttataccgtcagtaaggcaatgtgcaatgccgcgcgcgaagtgattttgatggcggactcatcaaagtttggccgtaaaagccccaacgtagtttgcagtcttgaaagcgtcgataagctgattaccgacgcaggtatcgatccggcgtttcgtcaggcgctggaagagaaagggatcgatgtgatcataaccggagagagcaatgagtgaagcactactgaacgcgggacgtcagacgttaatgctggagttgcaggaagcaagccgtttaccggaacgtctgggcgatgattttgttcgcgccgccaatatcatcctgcactgtgaaggcaaagtggtggtttcgggaattggcaaatcgggccacattggtaagaaaatcgccgcaacgcttgccagtaccggcactccggctttttttgtccatccggcagaagcgctgcacggcgatctggggatgatcgaaagccgcgatgtgatgctgtttatctcttactccggtggcgcgaaggaactggatctgattattccgcgtctggaagataaatctatcgcgctgctggcgatgaccggcaaaccgacgtcaccgctgggcctggcggcaaaagcggtgctggatatctccgtagaacgcgaagcctgcccgatgcaccttgcgccgacctccagcaccgtcaataccctgatgatgggtgacgcgctggcgatggcggtcatgcaggcgcgcggatttaatgaagaagattttgcccgctcccacccagccggggcactgggcgctcgcttgctgaataaagtgcatcatctgatgcgccgtgacgatgccatcccacaggtggcgttaaccgccagcgtgatggatgcgatgctggaactcagccgcaccggtctggggctggtggcggtatgtgacgctcaacaacaggtacaaggcgtctttaccgacggcgatttacgtcgctggctggttggcggcggcgcactcaccacgccagtcaatgaagcgatgacggtcggcggcaccacgttgcaatcgcaaagtcgcgccatcgacgccaaagagatcctgatgaagcgcaaaatcactgccgcaccggtggtggatgaaaacggcaaactcaccggcgcaataaacctgcaggatttctatcaggccgggattatttaatccttcaatcccagacgtttcgccagccgatgcaggttggcgacgtcggtttccagcatccgcgcgcaggcagcccagttgtgatgattttgtgccagtgcctgacgaatagtttcacgctggaacgcttctgtcgcttcacgcaggttttgcttaacaacgggcaccgccgccacttctggcgtcggcaacgtcacctcaggaaaagcaaaatgttgcgcctcaagaatcacttcatcgccgctgcgggtggctctcgccagaactaccgcccgatgaatagcatgttccagttcgcgcacgtttcccggaaaactgtagtgttgcagtaaatttcgcgctccggcacttaataccacgcgggagagcccctgccgcaaacgacactgctcgcagaaataccccgccagcagaatgacatcatcgccccgctcacgcagcggcggcaccgaaagtggaaacacgctcaggcgatgaaacaaatcggcgcggaatcgccctgccagcacctcttcgcgtaaatcgcggttagtcgccgccagcacgcgcacatcgacccgcaaacaacggtcatcgccaacgcgctgaatatcgccatactgcaacaccctcagcagcttggcctgcaatgccaacgacaactcgccgatctcatccagaaacagcgtgccgttatccgccatttcaaacttcccgctgcgattactgatagcgccagtaaacgctcctttcacatgcccgaacaactcactttccgccacactttccggcagtgcagcacagttgagatagaccagcggattcaccgcccgtggcgaggcttcatgaatcgctttcgccaccagctccttaccggttccagtctcaccgctgatcaggacgttgagatcggacgccgccacaatctcaatctcttttttcagttgcgtcatgccaggggacaagccaatcatctgcgtctgtttcaccgcttcaaacggcgtggcatcgcctggcagcatattctggctttccagttgttcaatcagcaacgcattgcttaacgctcccgccgccagcgcagcaatcagccgtagctcttcgtcgctgaaaacatcgaactgatcgggctgcatcccgtcgagcgtcagtgcgccgatcaggttttgcccggcaaacaatggcagaccaacgcaggcgtgaaccttcagactctcctgcccaggaatcaaaccgtcatagggatcgggcaattcgctgtctgcgggaaagcgcaccacatccccggcgcgggcaatcgcttccagccgtggatgcccttccagcgcaaagcgtctaccgagtacatcctttgccagaccgtcgatggcaagcggaataaactgccgcgaatcgtaacgtagcaacgcagacgcatcgcactccagcacctgacgtagcgtggtgatcaggcgctgaaaacgatcctggtgaccaatcccacgctgcaattcgatggcgatattcgccagcacatcaacggaaaaactcatctttgcctcactgtcaatttgactatagatattgtcatatcgaccatttgattgatagtcattttgactactcattaatgggcataattttatttatagagtaaaaacaatcagataaaaaactggcacgcaatctgcaattagcaagacatctttttagaacacgctgaataaattgaggttgctatgtctattgtggtgaaaaataacattcattgggttggtcaacgtgactgggaagtgcgtgattttcacggcacggaatataaaacgctgcgcggcagcagctacaatagctacctcatccgcgaagaaaaaaacgtgctgatcgacaccgtcgaccataaattcagccgcgaatttgtgcagaacctgcgtaatgaaatcgatctggcggatatcgattacatcgtgattaaccatgcagaagaggaccacgctggggcgctgaccgaactgatggcacaaattcccgatacgccgatctactgtacagccaacgctatcgactcgataaatggtcatcaccatcatccggagtggaattttaatgtggtgaaaactggcgacacgctggatatcggcaacggcaaacagctcatttttgtcgaaacaccaatgctgcactggccggacagcatgatgacttacctgacaggcgacgcggtgctgttcagtaacgatgctttcggtcaacactactgcgacgagcatctgttcaacgatgaagtggatcagacggagcttttcgagcagtgccagcgttactacgccaatatcctgacgccgttcagccgcctggtaacaccgaaaattaccgagatcctgggctttaacttaccagtcgatatgatagccacttcccacggcgtggtatggcgcgataacccgacgcaaattgtcgagctgtacctgaaatgggcggctgattatcaggaagacagaatcaccattttctacgacaccatgtcgaataacacccgcatgatggctgacgctatcgcccaggggattgcggaaaccgacccacgcgtggcggtgaaaattttcaacgtcgcccgaagcgataaaaacgaaatcctgactaatgtcttccgctcaaaaggcgtgctggtcggcacttcgacgatgaataacgtgatgatgccgaaaatcgccgggctggtggaggagatgactggtttacgcttccgtaacaaacgcgccagtgctttcggctctcacggctggagcggcggtgcggtggatcgtctttccacgcgcctgcaggatgcgggtttcgaaatgtcgcttagcctgaaagcgaaatggcgaccagaccaggacgctctgaagttatgccgtgaacacggtcgcgaaatcgcccgtcagtgggcgctcgcgccgctgccgcagagcacggtgaatacggtagttaaagaagaaacctctgccaccacgacggctgacctcggcccacggatgcagtgcagcgtctgccagtggatttacgatccggcaaaaggcgagccaatgcaggacgttgcgccaggaacgccgtggagtgaagtcccggataacttcctctgcccggaatgctccctcggcaaagacgtctttgaagaactggcatcggaggcaaaatgagtaacggcattgtgatcatcggttcgggcttcgccgcccgccaactggtgaaaaatattcgcaaacaggacgccactattccattaaccctgattgccgccgacagcatggatgagtacaacaaacctgacctcagccatgttatcagtcaggggcaacgtgccgatgaccttacccgccagacggcgggtgaatttgccgagcagtttaatctgcacctgtttccacaaacctgggtgacggatatcgatgccgaagcccgtgtggtgaaaagccagaataatcagtggcaatacgacaagctagtactggcaaccggtgccagtgcctttgtcccgcctgtgcctgggcgtgagttaatgctgacgttaaatagtcagcaagagtatcgcgcctgtgaaacgcaactgcgggatgcccgacgcgtgttgattgttggcggtggtttgattggtagcgaactggcgatggatttttgtcgtgcaggcaaagcggtcacgctaatcgacaacgctgccagtattctggcgtcgttaatgccaccggaagtaagcagccgcttgcagcatcggttgacggagatgggcgttcatctgctgttgaaatctcagttacaggggctggaaaaaacggattctggcattcaggcaacgctggaccgccagcgcaatatcgaagtggatgcggtaattgccgccaccggactgcgcccggaaaccgccctggcacgacgcgccgggctgacgattaatcgcggcgtttgcgtcgatagttatctgcaaaccagtaataccgatatttacgcgctgggcgattgcgcggaaattaacggtcaggtattgccgttcctccagccgattcaacttagcgcgatggtgctggcaaaaaatcttctcggcaataacacgccgctgaaactcccggcgatgctggtgaaaatcaaaacgccggaattaccgctgcatctggcaggcgaaacccagcgtcaggatttacgctggcaaattaataccgaacgccagggaatggtggcgcgcggcgttgacgatgctgaccagcttcgcgcctttgtggtcagtgaggatcggatgaaagaggcatttggattgttgaaaacattgccgatgtaggtgggctactgtgcctaaaatgtcggatgcgacgctggcgcgtcttatccgacctacggggacgcatgtgtaggccggataaggcgtttacgccgcatccggcaatggtgtccaaatgcaacacgttttatccgttctggacttcacccgctaaccaacgcgccgcagcaataaccccctgccccagagacaaaccgccatcacccgccggtaaactctgtggaaagagcaatgtgaaatcagcgagataatgcgccagacgtgcacgcagcaaacggttatgaataaccccgccgctaaataccagcgtagtgataccacgcatcgtggcctgctcacgcatcaacgcggcaaaaccctgcgccagcgcatcatgaaacgcccacgcgcgttgattaaccggtgcctgccagttcagccactgctgccagaaagtggcgagatccagttgattgtccacccgcggcattgtcaccggatgcgtcactccgtggcatgaggctgcgagcgcctccagagcacaagccgcttcaccttcataacttaacgtggctggcgcacagcccagtgccgccgccactgcatcgaaaaaacgcccacacgatgacgccagcggcgcgttaattccacgctcaatggcccgcgccagcacgctccagttttgctgttgcacacttgctgtttcagagtaattctgccactccggcacaaagcgcaggcactgcgccagcaggtttcgccacggctgcttcgctgccaaatcgccacccggaagcgccactgcaggcaagccgcccaggtgctcacattcgcgatagttcacccgcaggcactcgccgccccacaaagcgccgttctcccccataccgataccgtcgagcgtcaaagcaatgacatcaccgccatccagcggccactgatgctctgccagacacgccgctgcatgggcatgatgatgcagtaccgtttgcgtcggcagattcatttcacgcgcccactggctggagacatagcccggatgcgcgtcatgcacaacgtattgcggggtaaaatcgtagatgttttgcatcaggcgtaacgcttcgcgccactgcatctggatgccatcgtcacttaaatcgcccagatgctgactcaacaccgcttgttcaccgcgcaccaggcagaaggtatttttcagatccgcgccgagacacagcacaggcggaacatttttaaagcccggaggcaaagccagcgcatccggcacatacccccgcgaacggcgcagcatttcgccgctttcgcgcaccaccgaatcatccatccgctgcacgatgtcgcggttatgtatcaagaatccgtcggcaatgccctgcaaatccgccagcgcctgttcgttgctgatagctggtggtttaccgctcaggttgccggaggtcatcaccagcgggcattgcagttcctgtaacagcaaatgctggagcgggttcgcaggcaacattaccccgacttcgttaaggtcaggggcgatatcatcacaaagctcaggaacgtattttttatccaccagcacaatcggcgcggcgggcgtggtaagcaactggcgcgcagcgtctggtaaaccgtcagccactggcaacatgaccgccagcggtttcgccgggcgatgtttgcgcgcccgaagtgtcgccaccgcgttactgttacgtgcatcgcaggcaagatgaaatccgccaatccctttgatggcgacaattttgcccatttttaactgtgcgatagctgcctgtaatgccgcctcttgttccgcatgttcaccatgacttacccattcaagatgcgggccacactccgggcaggccaccggctgggcgtggaagcgacgatcgagcgggtcacggtactctttgtcacaggccggacatagcggaaacgccgccatcacggtaaacgggcggtcgtaaggcatggcgcgaataatggtgaaacgcgggccgcagtgggtacagttgataaacggataacgataacgccgttcgcctggggtattcatttcggcaaggcaagcagggcaagtagcggcatcgggaacaatttgcgtattcatggtgccgcctgtgctctggcgtatagtgaactcggtgggcagttgtgaccagataaacggctcacgctcgacgctatcaatacgcgccagcggcgggcagtgctgatacaattgaacaagaaacgtttccgggtcttcccgcagccggacttctacgccatcgccgtcattacagacatcgccgtgaagatttaattgctgtgccagctgccagacaaacggacgaaaaccgacgccctgcactttgccacgaatacgcagttggacaccgcaagatgtgttttttgccattgagttattcccgccatcatgaattgcgtaacccgccctgccggacacgacagcgtcgcatccggcagtcacaggtcggcgataccgcccgctccgtattctacgaatatttccgggaattcctttgatgccagaacagttctgtaagatttttagaacatcagcgccgtacggcggcgtttttctgcgctcagttgttcaagtttattacgatcgacacaaatcagcgcatgagtcgggcaagccgccatacacgccgggccgtcttcacgatggttgcacaggtcgcatttattggcttcggctttgtcagcccgtacattcagacccgcgccgctgttgcggatcaccggacgtaccaccacttccatcgcaccatacgggcaagccacaacgcaggttttgcaaccaatgcaacgttcctgcatcacatgaacaaaccctttatcacggctgatagcaccattcgggcagacgttagcgcacggtgcatcttcacactgacggcaaactgtcgccgtggaaatgttcacacctttaatgacatggatacgcggtaaaaaagtttccggggtcagcgatgcacagtcctgattttcctgatgagaaaccacgcacgctacttcacaggtacggcaaccaatacatttactcgcgtcagcaatgatgaaacggttcatcaaattctccagcaatgacagttaatgcgccgatacattcacaaatcatgccagtttttaatttactgttatttaaggaaattaatttctgtaatgcaggaaaaacgatgtcatcgacactagtgacgatgacatgtgatgacaatgtttatcgcgaaggagcaatgagtgagtcgcggcggatcagttttccgctgaaggttttcggcggtgagaaatccccgccatcgagcataaaaatcagccgtccaataatttcctgaatcatctcagtcaccggaatttttacgctggagagcgccggaacggtgtagggggcaatagcgatatcatcgaatccgataactgacacctgctctggcaccgctacgccgcgctcgtgtaacgctttcatcgcacctatcgccatatcgtcgttactggcaactaacgcgctaaatttagccccacgttcgagcaacatttctaccccttcggccccgctggcaggcgtccatttaccgttagcgataagtttttcattgagcgcaataccatgctgcgccagcgcgtctttatacccggcaagacgttcaatgctggtgggggaatccatcgagccggtaaggaaagcaatctcctgatgcccggcgtttatcaactctgccacggcgttaaaactggtctgtttatgatcgcaccagacgctatggctgctgtttttgcgcaggcggcgattaagcaccattatcggctgactgtgcgcgtcaatgatgtcatcgatctcatccacgcttaaaaaacgcgggtaaatcatgatcgcgtcgcagcgcagatccagcagatactgaatcgcctggcgctcttcttctgcgctgtgtttaccatctgccaatagcaactgccgccctttctcttccgccattcgcgcggcatgaaagagtaattcactaaaataaatgccgtggtaaagcgtgttggtcactaccagccccagcgtctgagtactcttcgccgacagattgcgcgccagcaagtttggacggtaaccgctctcttctaccgcctgaaacacgcgatctttagtctcctggctgacgtagccattacctgaaagcacgcgggaaacggtcgcttttgaaaccccggcgcgcttcgccacttccagcatcgtcgtcatcattttcatccctttacacgcaatcaacgcagtgtactgcaccgtttgccgattgtccttgcacaatcggcgggaaaaatattcaggtgaccggtttcacaaatataaaaaatgaacaattcactctcttgcttatttagtgacaactattcatgattttgtgaaaccggtttcttaattccgtttcagcatcggcatttttccgtcacgtcgactgataacaactacatctaccctactgataacaggataaaatccgatggccaaaaattatgcggcgctggcacgctcggtgatagcggcactgggcggcgttgataacatctcggcggtcacgcactgtatgacgcggttgcgctttgttatcaaagatgatgcacttatcgacagcccgacgttaaaaaccatccccggcgtgctcggcgtggtacgtagtgacaaccagtgtcaggtgattatcggcaataccgtttcacaagcctttcaggaagtcgtcagcctgctgccgggagatatgcagcccgcacagcccgtgggtaaacccaaactcacgctacgtcgcattggtgcggggatcctcgatgcgctgatcggcaccatgtcaccgctgatcccggcgattatcggcggatcgatggtcaaactgctggcaatgatcctcgagatgagcggcgtgctgacaaaaggatcgccgaccttaaccattctgaatgtgattggtgacggtgctttcttcttcctgccgctgatggtcgcggcatctgccgccatcaaatttaaaaccaatatgtcgctggcgattgccatcgcgggtgtgctggtacatccgagttttattgaactgatggcgaaagcggcccagggtgaacatgtcgaatttgccctgattccggtcaccgcggtgaaatacacctacacggtgatcccggcgctggtgatgacctggtgcctgtcatatatcgaacgctgggtggacagcattacaccggcggtgaccaaaaacttcctcaaaccaatgctgattgtgttgattgccgcaccgctggcaatcctgctgattggcccgattggtatctggatcggtagcgccatttcggcgctggtttacaccattcatggttatctgggctggctttcagtcgccattatgggcgcgctgtggcctctgctggtaatgaccgggatgcaccgcgtctttacgccaaccatcattcagaccattgccgaaaccggcaaagaagggatggtcatgccgtcagagatcggcgctaacctgtcgctgggcggttcatcactggcagtggcgtggaaaacgaaaaacccggaactgcgtcagacggcgctggctgcggcggcatcagccattatggcggggatttccgaaccggcgttatatggcgtggcgatccgcctgaaacgtccgcttatcgccagtcttatcagcggttttatttgcggcgcggttgccggtatggcggggcttgccagccactcaatggcagcgccggggctatttaccagcgtgcagttcttcgatccggcgaatccaatgagcatcgtctgggtgttcgcggtcatggcgctggcggtggtgctgtcgtttatcctcacactgttgctcggctttgaggatattcctgttgaggaagcggctgcccaggcgcgaaagtatcagagcgtacaaccgaccgtcgccaaagaagtaagtcttaattgaggatgaaaatgtcagtatttccagaaagttttttatggggcggcgcgcttgccgccaaccagtctgaaggtgcgttccgtgaaggtgacaaaggtctgaccactgtcgatatgatcccacacggcgagcatcgaatggcggtgaaactggggctggaaaaacgttttcagttgcgagatgacgagttttatcccagccatgaggcgacggatttttatcatcgttataaagaagatatcgccctgatggcagagatgggattcaaggttttccgtacctcaattgcctggagccgtctctttccgcagggcgatgaaatcacgcccaatcagcagggcattgctttttatcgttctgtctttgaagagtgtaaaaagtacggtatcgaaccgctggtcacgttgtgccacttcgatgtgccgatgcatctggtcaccgaatatggctcctggcgtaaccgcaagctggtggagtttttcagccgctacgccagaacctgctttgaagcatttgatggtctggtgaaatactggctaaccttcaatgaaatcaacattatgttgcatagcccgttctccggcgcgggtctggtgtttgaagaaggtgaaaatcaggatcaggtgaaatatcaggccgcgcatcaccagctggttgccagtgcgctagccaccaaaatcgcccatgaggttaacccgcaaaatcaggtgggctgtatgctggcgggcggtaacttctacccttacagttgcaagccggaagatgtctgggcggcgctggagaaagaccgggaaaacctgttttttatcgatgtgcaggcgcggggcacgtatccggcttactctgcccgcgtattccgcgaaaaaggggtaaccatcaacaaagcaccgggcgatgatgaaatcctgaaaaacaccgtcgattttgtctctttcagctattacgcctcgcgctgcgcctcggcggagatgaacgccaacaacagcagtgcggcgaacgtggtgaaatcgctgcgtaatccgtatctacaggtgagcgactggggctggggaattgatccactcggtctgcgtatcaccatgaatatgatgtacgatcgttatcagaagccgctgtttctggtggaaaacggcctgggcgcaaaagatgaatttgctgccaatggcgagattaacgacgactatcgcatcagctacttacgcgaacatatccgcgcaatgggcgaagcgattgcagacggcattccgctgatgggctacaccacatggggctgtattgatttagtttccgcctctacgggtgaaatgagcaaacgctacggctttgtctttgttgaccgtgacgacgcaggcaacggtacgctgacgcgcacgcgtaagaaatcattctggtggtataaaaaagtgattgccagtaatggggaagatttagagtaggtaacagtgccggatgcggcgtgaacgccttatccggcctacatgtcgcacgaaccatgaaggcccgataagcgcagcgcatcgggcaatttagcatttggcatcagagctggttcaccccatcaagaacatccctgtcctgattccttaatgaaaaactactcttcttccaccgctaactgcgcgaagccgccatttccttcccagccttccagtcgttgataaacggtttctaccgcatctttaatcggctgggtcatcgggtagtaaaagccgacgatatccggctgaatgccgaggaaaatcacttcgccaatatcttctttcaactggtcgataaggtaattcaacggcatgttatgggtagtcatcataaacatctcggcgatatcatccgggtcgatgatgcggatctcgccggggtttagccccatatccgtggcgtcgacaatcagcagtcgtgtcgggcgcagttcacggatagcgacgatgtcgttttccggtgcgctaccgccgtcaatcaccacccagttacctttcggcgcggcggcgcacttttccgccagcagcggacctgcgccatcatcgcccatcatgctattgccaacacagagtaaaacgtcagtcacgcagtctcctcaccatcaaatagatggcgttttcctgatgaatatcatgcagcatacttaacagcattgtactccattcctgctgctgcgaagtttgcgctgcccgggctttatcgaatgcgttggccagcatcggcacatggttaatgtcgatgacgatctcaccatatttcggcacgccttccattttgcggcgggcttcactgcctgcctccagagtggcaatccatgccagatattcatcccacgggcaggtgagcgccgcttccaggcaatcgataaccccaaggtggtgaccaatcgccaggctgtaatagaccacctgctgcgcctcggcgggcgtggcatcgttctcatcaataaatttacggctcagttgactgaacaccaccttttcactcatcggatacgcgcctcttcaacaacatgattcagatggctgacaatctcgttcagacgcggatcgttttccgcttccagccagcgtgcaacctgttcttcgccctgccctaactgtgtaaggtaatcatcggcaatctgacgaccgtaacgataacccgccaggcgacgtgcttcgcgatccactttcacgcgcagcggctgcaccatatcaccatgcaggatctccgccggttgttcatccagttcacccggcccacgggcgtgaattttctgctccagcaggccgagcgccattgcaaagccgtacagcgtggcggcaggcgttggcgggcagccagggatataaacatccacagggacaattttatccgtaccgccccacacgcagtagagatcgtggaagatcccgccactgttaccgcaggcaccgtaggagatacaaattttcgggtccggcgcggactgccacgcacgcagcgcaggggatcgcattgcacgggtgaccgcgccggtaaacagtaaaatatccgcatgacgcggtgaaggaacgactttaatgccgaatcgttctgcatcaaacagcggcgaaagcgtggcgaaaatttcgatttcgcaaccgttgcagccgccgcagtccacgcggtaaacataggcagaacgtttgatttttttcagtaacgacgccttcatgctggcgatggattcatccaccgtcatggggaccggaatgccgttggcgtcacgggggcctaataaattgctcatcagatggcctctttcatatggcgagtcagttcaatacggtcggacggcaccaggcatttctggcgcttacattccgggcaagtctcaaagctttcgcggtggttttccgcgcggctgtcgccgttgtgcttaagcagcgcaatggcgtagtcgatctctttctggacggcgaaaggacgattgcagacgcggcagttgcacagcgcgaagcgggactgttgcaggaagtcttctttcttccacaccgccagttcgtactcttgcgacagtttgatcgccgccgtcgggcagacttcttcgcagcgtccacagaagatgcagtgcccaagattaaactcccaggcaagctctcctgtggcgaggtcagtttcaaccgttaaggcgtttgacgggcaggcattgacgcaggccgcgcagccgatgcactgctgcgggttctgctctggcttaccacggaagtttttatcaaccgcaatcggctccagcggataagacgaggtcgccgtgccggttttgatgacttttttgataaaggtaaacatggcgattccttatttcagcggcgagtttttacgctcaatgctgtaacgctcgagttctttgtacggcaccactttgctcttcttcttacgcacatcgaccacggtcatgcggtcggtacaggagtagcaagggtcgaggctaccgataatcagcggcgcatcggaaacggtgttgccgcgcagcatgtagcgcagggtcggccagttcgcgtaggtcgcggcacggcagcgccagcggtacagcttctggttgtcgccggtcatgctccagtggatatcatcgccgcgcggcgcttcggcaaagcccagcgcaaagcggtgcggaatgtaggtaaagccttccaccatcagtgggccacccggcaggttatccagaccgtagtcgatcatgttcagcgcggtatagacttcgttgatacgcactttcagacgggaaataacgtcgcagccctgctcgctgtggacttccattggcagcaggccatagccgacaaacgggtgatcggcgcgggtatcacgggcgtgaccgctggcacggaccatcgggccgacgttactgaagtcgcgagcgatttccgggtccagacgaccaatgccgacagtgcgctgttccatgttcggagtgctcagcagcacatccaccagctcctgcacttcacgacgcatctgttgtgccagctggcgggtctggatcatgtcgtctttcagcagatcgcgacgaatcccgccgatcaagttcaggccgtaggttttacgcgcaccggtaaggatctctgccattttcatggaggtttcacgcacgcggaagaactgcataaagccggagtcgaagccggtaaagtgacaggccaggccaaggttgagcagatgcgagtgcaagcgttctacctccagcagaatggcgcggatcatctgcgcacgttctggcacctgaatacccatcgcgttttccaccgacgtggtgtaggcggtgctgtgggcaaagccgcagatcccgcacacacggtcagagaggaaggtcacttcgttataacccatacgggtttccgccagtttttccatgccgcgatggacgtagaacagacggtagtcggcgtcgataatgttttcgccatcgacgaacagacggaagtggcccggttcatcagaagtgacgtgcagcggaccaatcggcacgacgttgtttttcttgtcgcccagttcgttgatgaactcgtaggtttcagcatcggtggtcggtgccggacgctgacgataatccatgctgtctttacgcagcggataaagttcatccggccagtcatccggcagcaccagacgacgttcatccggcagaccaaccggaatcaaaccgtacatatcgcgcacttcacgctcgccccacaccgccgccggaacgcgcggcgtcacggacggatattccggtttgttggcgtcaacttcgacgcgaaccgtaatccaacacttagtgcccttctccatcgacagcacgtagtaaacggcgtaatgaccattcagtttgcgttcgtcgttaccaaacagcaccgacagccagccaccctgtttgtagtaaagaaactccaccacttccggcaggtagttcacctttacggtgacagtcagctgatctttggtctgccaggcgtggtccagcacgacgcccggaaatgcctcattcagcgcggcgagataatgttgacctaatttttcttcagacatgctcaaactctctttaatcacgccgccagcaaggagacgaacgctaaaaatgcaaagccaaacccagcccaggtaatgcgcggagtaatatcaagacgcagacgggccatgctgttttcgaacagcgcgataaccaggacgccgaccaccagttttacgatggcaatcaccagcgccagcagcagtccaccggcggtgaaggtttccatttgtccccacggaataaacaccccgacgaacatctgcaacaccaccagctgtttcaggctgataccccatttcatgacgccaaagccgctgccgctgtattcagagagcgggccttcctgcagctcctgctcggcttccgccaggtcgaacggcagtttgcccatttcgataaaggtggcgaacgcacaggcacaaagcgccagtaccagcgggatgctctggctcagcggccagtgataaacggtgtcggtgatgttgctgatgttggtggaaccggcaacctgtgcggcaacccacagaccaagcagcagcatcggttcgaccagcacgccaagcatcgcttcacggctcgcgccgatagcggtaaacgggctaccggtatccagaccagaaatggcaaagaagaaacgcgcgatggcaaagagatacagtaaggtgatcaaatcacccagttgcggcagcggagaaccgacggtcaccaccggcagcgcagtagcgatagtcagcatgacgcccaccatcacatacggcgtcaggcggaacacccagccggaggcatccgggccgacgctctgacgccccagcagtttgataatgtcgcgatactcctgcaacacgcccggcccgcgacggttatgcaagcgggcgcgcgccacgcgggttataccggagagcagcggcgcaacggcaaataacaccagcgcctgaattaacggatataaaacactcattctcaggctcctcgtgaaacaataatcaccaccagtaccgccagttcaaccagcgccatccggcggaacagcaacgcactcccctcgcactgccagcccggcaccagagacaccggattcagccatttgcgtagtttcagcaccggcgcaaacgcctgtttcaccggcatggcaaaaccgtgagcggtaatcaccattgatttttcgtggtcgtaaccgcacacccaggccgcaccgcgggaacgcgatggcaaacgatcgcctttgcaaatcgccataatgatgaatggcagcagcgggcaggcaatcagcagcaacgtgatcatcggttgagaaacggtggtgttagcaggctccagcggcagaggtacagcagcagagagcatcggcagtagccacggcgcagcaacaccgccaattacgcagcaaatcgccagtgccactacgcttacgctcatcaggagcggcgcacaggtggcgttttcggcttctttggtgcgcggcgcgccgaggaacgtgacgccatagactttcgccatacacatcaccgccagcgcaccggtaattgccagccccacagcgagcagcggccccagcagacgggcaacaaacgcgccactattgctcagtttgaaaaatgattgatagataacccattccccggcaaaaccattcagcggcggcagcgcagccattgccatcagcccgactaacatggcgatggagataaccggcattttcttgccaataccaccgagtttttcgatatcgcgatgaccggtacggaaccagacgctccccgccccgaggaacagtacgcttttgaacaggctatggttaagcagatggtacagaccaccgaccaggccaagagcaatcagcgccggttgttcgagcgcgatacccgttacgccagcgcccagccccagcaggatgatgccgatattttccagggtgtggtaagccagcaggcgctggatgttgtgctccaccagcgcatacagaccaccgacaaacgcggtgatcatgccgagcaccagcagcgcgatcccccaccacagcggtgcattaccgcccagcagtgacagggttaaaatgcccagcaggccaattttcatgactaccgtagaaaacaacgcggcagctggcgcagaggcgttcgcatgtgcctgcggcacccagccgtgcagcggaataatcccggccagcaggccaaagccaatcactccgagcagccagatatcggaaccgagcggcagctgttgcatacgcatatccagcaggcgcagatccagcgtgccgtaacgctgccacagcagccagcaagcaatcgccagcagcagagtgccaagacgccccagcgcaaaccacagtttgccctctttgctgttgctggtgaggaacaccgcgcacagggccatgatttcggccattaccacgaacatgccgaggttgctggcaatgacggcgcagacggcggcagccatcaacatattgatctgcaagccgttgcacttcacctgcgcgtggcgatgccagtcaatgttgtagaggctgacaaacagaccgcacagaccgagcgtaatcagccaaatcgcgttaagcggagagatttgcacatcgtagcttaccagcgacagcgcaccgctcacgccaaccgcgccagtcagtacagtgaagcccgcggctgccgtatacagactaccaaccgcgccgccaattccagctatccagccacttaacgctttttgaaaagaaaagagaaatgccagaacagcggcggcgacaaaccacgccacgccgctattgatcagggaaattgcgctcatttagcctctccactttgagcctgctgaaacaaggtgagatcgccaaagtccgtgttaaaggtcagctcacgcttacgtttgctgacgcgggcgatatcggtgttatccaccagatgcagggctttagtcgggcacatccgcacgcaggccggaccttgttcatcaaagctacaaaggtcacatttgacggcgatcgcgcgaatacctggcacccagtcaagcaatgtgctgacacgcgccggagcaggcggtgccggtggcgctttcggggtattggcgtttgccggaatatccagcggacggctgccggaaaattcaattgcgccaaacgggcaggcgatgccgcacagcttgcagcttacgcacaggctttcattcaactgcacggccccatcgacgcgggtgatggcgttaaccgggcagaccaccgcgcagggtgcatcttcacagtggtgacagagctgcggcgcagattctttttcattcagcatcactctcaggcgcggcattgattgcaggccgtgctggcgatgcgtctctgaacaggcggcctcacaagtgtggcagccgatacagagcgtggagtcagcaattacaaaacgattcaccaggcattcctcaggtgattgtcatttttgacgaaaacatgccgatgaaatgtcattttcgacactcatcgacacgcccatccccaaacaggcgtaacgcctgcaaaacgggcaaagcctcagctcatgctgccgggctttgtccctttaccagttggcttaaattcaccggcacattgttttcaatagcggtgtataagctgtcgtaaacgccagcgattttttcgagatagtgttccagaacctgttcgcgatcgcggatgttgaccttgccatcaatcatgccgtcaatgctcagttgcgcctgcgcaatccgctgtttgtcttcgccatcttttgtttcgacgtaatactcgatggtgtggctgttaaagccatccgccagggtgacgtaaatgcgaaaatgttcaaaaaggacgaaacagagttctttgtccggcgcgcagctcatggcgtgatgcaggcgcgctttcgataacgtgatcccctgaaccagcgaattgcagtagatgtgccactggtcctgtaggcgacgatgccgctgtgcgatgtaatcggctttctcgcttatttcccaaatagtcattgtcaggttacccgtttaacagagatgccagctttaagcattttttgtgccaacttttaatttattgttattaaagagatttttaagctaaagatgaatttcgtcgccgtgtcgacgtgtcatttcgacatcatcgacattattcaccgcagggataatcaacactggcacaattattgcttgtagctggcaatagttaatgggaggcgatatgcacgaaataaccctctgccaacgggcactggaattgatcgaacagcaggccgcaaaacacggcgcaaaacgcgtaactggggtctggctcaaaattggcgcattttcttgtgtcgaaaccagctctcttgccttttgttttgatctggtttgccgcggcagcgtggcggaaggttgtaaactgcacctcgaagaacaagaggccgaatgctggtgtgaaacatgccaacagtatgtgacgctactgacccagcgcgtccgccgctgtccacagtgtcatggtgacatgctgcagattgtggcagacgacggtttacagattcggcggatagaaatagaccaggagtgagcgatgtgtacaacatgcggttgcggtgaaggcaacctgtatatcgagggtgatgaacataaccctcattccgcgtttcgtagcgcgccatttgccccggcggcacgcccgaagatgaaaatcaccggcattaaagcgcctgaatttacccccagccagactgaagaaggcgacctgcattacggtcatggcgaagcgggcactcacgcaccgggcatgagccagcgtcggatgctggaagtcgaaattgacgtgctggacaaaaataaccgtctggctgaacgcaaccgcgcgcgctttgctgcccgcaagcaactggtgctcaacctggtttccagccctggttccggtaaaaccaccctgctgacggaaaccctaatgcgcctgaaagacagcgttccgtgcgcagttattgaaggcgaccagcaaaccgtgaacgatgccgcacgcattcgcgctaccggcacaccagcgattcaggtgaacaccggtaaaggctgccatcttgacgcacagatgattgccgacgccgcaccgcgtctgccactggacgataacggtattctgtttatcgaaaacgttggcaacctcgtatgcccggccagcttcgatctcggtgaaaaacacaaagtggcggtgctttccgttaccgaaggtgaagacaaaccactgaaatatccgcatatgtttgccgccgcctcgctgatgctgctcaacaaagttgacctgttgccgtatctcaactttgacgttgaaaagtgcatcgcctgcgcccgcgaagtcaatccagaaattgaaatcatccttatttccgccaccagcggcgaagggatggaccagtggctgaactggctggagacacagcgatgtgcataggcgttcccggccagatccgcaccattgacggcaaccaggcgaaagtcgacgtctgcggcattcagcgcgatgtcgatttaacgttagtcggcagctgcgatgaaaacggtcagccgcgcgtgggccagtgggtactggtacacgttggctttgccatgagcgtaattaatgaagccgaagcacgcgacactctcgacgccttacaaaacatgtttgacgttgagccggatgtcggcgcgctgttgtatggcgaggaaaaataatgcgttttgttgatgaatatcgcgcgccggaacaggtgatgcagttaattgagcatctgcgcgaacgtgcttcacatctctcttacaccgccgaacgccctctgcggattatggaagtgtgtggcggtcatacccacgctatctttaaattcggcctcgaccagttactgccggaaaacgttgagtttatccacggtccggggtgcccggtgtgcgtactgccgatgggtagaatcgacacctgcgtggagattgccagccatccggaagtcatcttctgtacctttggcgacgccatgcgcgtgccggggaaacagggatcgctgttgcaggcaaaagcacgcggtgccgatgtgcgcatcgtttactcgccgatggatgcgttgaaactggcgcaggagaatccaacccgcaaagtggtgttcttcggcttaggttttgaaaccactatgccgaccaccgctatcactctgcaacaggcgaaagcgcgtgatgtgcagaatttttacttcttctgccagcacattacgcttatcccgacgttgcgcagtttgctggaacagccggataacggtatcgatgcgttcctcgcgccgggtcacgtcagtatggttatcggcaccgacgcctataattttatcgccagcgattttcatcgtccgctggtggttgctggattcgaaccccttgatctactacaaggcgtggtcatgctggtgcagcagaaaatagcggcccacagcaaggtagagaatcagtatcgtcgagtggtaccggatgccggtaacctgctggcgcaacaggcgattgccgatgtgttctgtgtcaacggcgacagcgaatggcgcggcttaggcgtgattgaatcttctggcgtgcacctgacgccggattatcaacgattcgatgccgaagcacatttccgcccggcaccgcagcaggtctgcgatgacccgcgcgcgcgttgtggtgaggtattaacgggcaaatgtaagccgcatcaatgcccgctgtttggtaacacctgtaatcctcaaaccgcgtttggtgcgctgatggtttcctccgaaggagcgtgcgccgcgtggtatcagtatcgtcagcaggagagtgaagcgtgaataatatccaactcgcccacggtagcggcggccaggcgatgcagcaattaatcaacagcctgtttatggaagcctttgccaacccgtggctggcagagcaggaagatcaggcacgtcttgatctggcgcagctggtagcggaaggcgaccgtctggcgttctccaccgacagttacgttattgacccgctgttcttccctggcggtaatatcggcaagctggcgatttgcggcacagccaatgacgttgcggtcagtggcgctattccgcgctatctctcctgtggctttatcctcgaagaaggattgccgatggagacactgaaagccgtagtgaccagcatggcagaaaccgcccgcgcggcaggcattgccatcgttactggcgatactaaagtggtgcagcgcggcgcggtagataaactgtttatcaacaccgctggcatgggcgcaattccggcgaatattcactggggcgcacagacgctaaccgcaggcgatgtattgctggtgagcggtacactcggcgaccacggggcgactatccttaacctgcgtgagcagctggggctggatggcgaactggtcagcgactgcgcggtgctgacgccgcttattcagacgctgcgtgacattcccggcgtgaaagcgctgcgtgatgccacccgtggtggtgtaaacgcggtggttcatgagttcgcggcagcctgcggttgtggtattgaactttcagaagcggcactgcctgttaaacctgccgtgcgtggcgtttgcgaattgctgggactggacgccctgaactttgccaacgaaggcaaactagtaatagctgttgaacgcaacgcggcagagcaagtgctggcagcgttacattcccatccactggggaaagacgcggcgctgattggtgaagtggtggaacgtaaaggtgttcgtcttgccggtctgtatggcgtgaaacgaaccctcgatttaccacacgccgaaccgcttccgcgtatatgctaataaaattctaaatctcctatagttagtcaatgaccttttgcaccgctttgcggtgctttcctggaagaacaaaatgtcatatacaccgatgagtgatctcggacaacaagggttgttcgacatcactcggacactattgcagcagcccgatctggcctcgctgtgtgaggctctttcgcaactggtaaagcgttctgcgctcgccgacaacgcggctattgtgttgtggcaagcgcagactcaacgtgcgtcttattacgcgtcgcgtgaaaaagacacccccattaaatatgaagacgaaactgttctggcacacggtccggtacgcagcattttgtcgcgccctgatacgctgcattgcagttacgaagaattttgtgaaacctggccgcagctggacgcaggtgggctatacccaaaatttggtcactattgcctgatgccactggcggcggaagggcatatttttggtggctgtgaatttattcgttatgacgatcgcccctggagcgaaaaagagttcaatcgtctgcaaacatttacgcagatcgtttctgtcgtcaccgaacaaatccagagccgcgtcgttaacaatgtcgactatgagttgttatgccgggaacgcgataacttccgcatcctggtcgccatcaccaacgcggtgctttcccgcctggatatggacgaactggtcagcgaagtcgccaaagaaatccattactatttcgacattgacgatatcagtatcgtcttacgcagccaccgtaaaaacaaactcaacatctactccactcactatcttgataaacagcatcccgcccacgaacagagcgaagtcgatgaagccggaaccctcaccgaacgcgtgttcaaaagtaaagagatgctgctgatcaatctccacgagcgggacgatttagccccctatgaacgcatgttgttcgacacctggggcaaccagattcaaaccttgtgcctgttaccgctgatgtctggcgacaccatgctgggcgtgctgaaactggcgcaatgcgaagagaaagtgtttaccactaccaatctgaatttactgcgccagattgccgaacgtgtggcaatcgctgtcgataacgccctcgcctatcaggaaatccatcgtctgaaagaacggctggttgatgaaaacctcgccctgaccgagcagctcaacaatgttgatagtgaatttggcgagattattggccgcagcgaagccatgtacagcgtgcttaaacaagttgaaatggtggcgcaaagtgacagtaccgtgctgatcctcggtgaaactggcacgggtaaagagctgattgcccgtgcgatccataatctcagtgggcgtaataatcgccgcatggtcaaaatgaactgcgcggcgatgcctgccggattgctggaaagcgatctgtttggtcatgagcgtggggcttttaccggtgccagcgcccagcgtatcggtcgttttgaactggcggataaaagctccctgttcctcgacgaagtgggcgatatgccactggagttacagccgaagttgctgcgtgtattgcaggaacaggagtttgaacgtctcggcagcaacaaaatcattcagacggacgtgcgtctaatcgccgcgactaaccgcgatctgaaaaaaatggtcgccgaccgtgagttccgtagcgatctctattaccgcctgaacgtattcccgattcacctgccgccactacgcgagcgtccggaagatattccgctgctggcgaaagcctttaccttcaaaattgcccgtcgtctggggcgcaatatcgacagcattcctgccgagacgctgcgcaccttgagcaacatggagtggccgggtaacgtacgcgaactggaaaacgtcattgagcgcgcggtattgctaacacgcggtaacgtgctgcagctgtcattgccagatattgttttaccggaacctgaaacgccgcctgccgcaacggttgtcgccctggagggcgaagatgaatatcagttgattgtgcgcgtgctgaaagaaaccaacggcgtggttgccgggcctaaaggcgctgcgcaacgtctggggctgaaacgcacgaccctgctgtcacggatgaagcggctgggaattgataaatcggcattgatttaactgcaaattgccggacagatctgcctgtccggcatactattcatgaggttttttcggacgatatttttccggcagttctggcaccggacgcttgtcatcgatgagatgacgcacggttaagatcggatgacgccacagcattctcggcccggcccaacgcataatctgtttcatctcttcacgctttgcaggctggtaacagtgcaccggacactgcttacaggctggtttctcttcgccgaacacacatttatccagccgcttttgcgcgtaaacaaacaacgcctcgtaatgctccggctccgctgacgcctgcgggcatttcgcttgataaagatcgatcatttttttaatcgtcagtttttcacgagagatacgcttgccggacatgctgcctccacctcattaagatgtatttatattacatcttaatcttaaagggcactatgactccaaagaagaagggttagccaaccgatacaattttgcgtacttgcttcataagcatcacgcaaaagctgcaaaacagcatctttcccggaaccagcatcaagaactcgccgttcgcttcttcccctgaaatgattaactccggtatcatgtgcgccttatgtgattacaacgaaaataaaaaccatcacaccccatttaatatcagggaaccggacataaccccatgagtgcaatagaaaatttcgacgcccatacgcccatgatgcagcagtatctcaggctgaaagcccagcatcccgagatcctgctgttttaccggatgggtgatttttatgaactgttttatgacgacgcaaaacgcgcgtcgcaactgctggatatttcactgaccaaacgcggtgcttcggcgggagagccgatcccgatggcggggattccctaccatgcggtggaaaactatctcgccaaactggtgaatcagggagagtccgttgccatctgcgaacaaattggcgatccggcgaccagcaaaggtccggttgagcgcaaagttgtgcgtatcgttacgccaggcaccatcagcgatgaagccctgttgcaggagcgtcaggacaacctgctggcggctatctggcaggacagcaaaggtttcggctacgcgacgctggatatcagttccgggcgttttcgcctgagcgaaccggctgaccgcgaaacgatggcggcagaactgcaacgcactaatcctgcggaactgctgtatgcagaagattttgctgaaatgtcgttaattgaaggccgtcgcggcctgcgccgtcgcccgctgtgggagtttgaaatcgacaccgcgcgccagcagttgaatctgcaatttgggacccgcgatctggtcggttttggcgtcgagaacgcgccgcgcggactttgtgctgccggttgtctgttgcagtatgcgaaagatacccaacgtacgactctgccgcatattcgttccatcaccatggaacgtgagcaggacagcatcattatggatgccgcgacgcgtcgtaatctggaaatcacccagaacctggcgggtggtgcggaaaatacgctggcttctgtgctcgactgcaccgtcacgccgatgggcagccgtatgctgaaacgctggctgcatatgccagtgcgcgatacccgcgtgttgcttgagcgccagcaaactattggcgcattgcaggatttcaccgccgggctacagccggtactgcgtcaggtcggcgacctggaacgtattctggcacgtctggctttacgaactgctcgcccacgcgatctggcccgtatgcgccacgctttccagcaactgccggagctgcgtgcgcagttagaaactgtcgatagtgcaccggtacaggcgctacgtgagaagatgggcgagtttgccgagctgcgcgatctgctggagcgagcaatcatcgacacaccgccggtgctggtacgcgacggtggtgttatcgcatcgggctataacgaagagctggatgagtggcgcgcgctggctgacggcgcgaccgattatctggagcgtctggaagtccgcgagcgtgaacgtaccggcctggacacgctgaaagttggctttaatgcggtgcacggctactacattcaaatcagccgtgggcaaagccatctggcacccatcaactacatgcgtcgccagacgctgaaaaacgccgagcgctacatcattccagagctaaaagagtacgaagataaagttctcacctcaaaaggcaaagcactggcactggaaaaacagctttatgaagagctgttcgacctgctgttgccgcatctggaagcgttgcaacagagcgcgagcgcgctggcggaactcgacgtgctggttaacctggcggaacgggcctataccctgaactacacctgcccgaccttcattgataaaccgggcattcgcattaccgaaggtcgccatccggtagttgaacaagtactgaatgagccatttatcgccaacccgctgaatctgtcgccgcagcgccgcatgttgatcatcaccggtccgaacatgggcggtaaaagtacctatatgcgccagaccgcactgattgcgctgatggcctacatcggcagctatgtaccggcacaaaaagtcgagattggacctatcgatcgcatctttacccgcgtaggcgcggcagatgacctggcgtccgggcgctcaacctttatggtggagatgactgaaaccgccaatattttacataacgccaccgaatacagtctggtgttaatggatgagatcgggcgtggaacgtccacctacgatggtctgtcgctggcgtgggcgtgcgcggaaaatctggcgaataagattaaggcattgacgttatttgctacccactatttcgagctgacccagttaccggagaaaatggaaggcgtcgctaacgtgcatctcgatgcactggagcacggcgacaccattgcctttatgcacagcgtgcaggatggcgcggcgagcaaaagctacggcctggcggttgcagctctggcaggcgtgccaaaagaggttattaagcgcgcacggcaaaagctgcgtgagctggaaagcatttcgccgaacgccgccgctacgcaagtggatggtacgcaaatgtctttgctgtcagtaccagaagaaacttcgcctgcggtcgaagctctggaaaatcttgatccggattcactcaccccgcgtcaggcgctggagtggatttatcgcttgaagagcctggtgtaataacaattcccgatagtcttttgctatcgggaatattaacgacaactgacgaataaaataaaaacaccctgtataataggaaagcttattttacagggtaaaaccatgccatctacacgctatcaaaaaatcaatgcccatcactatcgccatatatgggtcgttggtgatattcatggtgaatatcagttattacaatcccgcttacatcaactctcttttttccccaaaatcgacttacttatttctgtcggcgataatattgatcgtggaccggagagtcttgacgtcctgcgcctgctaaaccaaccctggtttacgtcggttaaaggcaaccacgaagcgatggcgcttgaggcattcgaaactggcgatggcaatatgtggcttgccagcggtggtgactggtttttcgatttaaatgattcagagcaacaagaggcaatagatctgttgctgaaattccatcaccttccacatattattgaaatcactaacgacaacataaaatatgccatcgcacatgcagattatccggggagtgaatatctctttggtaaagaaatagcggagagcgaattactctggcctgttgatcgtgtgcagaaatcgcttaatggcgagttacaacaaataaacggcgctgattattttatatttggacatatgatgtttgataacattcagacgttcgctaaccagatttatattgataccggatcgccgaacagcgggcggctgtcattttataaaataaagtagtctcatgcttcttctgtgaagcatgagtaacccggtgttattgcaggccattattcatttttcgctaccagcaaagagagatcctgcttcaccagcgcgcgactggcactctccggcaaaccgtcgtctgtaataatctgatcaaactcgcttaatggtaacgccagccatgtcgccacctgaccatatttcgtcgcatcacagaccaaaactcgctggcggctggcactggcaatcgcccgtttcaccgtgactttatcttccgctggcgtagaaatcccccgcacactccatgacgatgcagaaataaaagcctgatcaatcatcaggctgcgcagcatggtcgcagcggcttccccgacacaggaacggttttcccgacacactgcaccgccagtgtgaataattgtgcaattactgttgtcgagcaagtagtccgcaataacgaaatcgtttgtgaccacagtcagtgactccatgtgaatcagatgctgtgctatcgctaacgtggtcgttcccgcatccagatagatacaacttcccggctgaacaagacttgccgccagcttgccaatagccgctttttgcgtcattgccagcgcagtttttacctgatgagaaggttcatgcgccacgcgtcccggagactggacgcctccggacaccagcacaacggctccctgctgctccagtttttgtaaatcccgacgaatggtcatatgtgacacattcattctgtccgttagttcagcaatactgacaatgcctttttcagctaccatctcaaggatgatttggcgacgctctacgggtatcaacttttgctccttcctttgtcctgctgacattctacgctatttgcctgcgaaacgtgcgcggcgcaactaacgcttagttcacataaaataacacacaatgttaatttatgtgaatcagatcaccataccgttatcttccagcgcttatattcacaatatcaaacaaaatatcacttaaattaacaaggagagcagatgaaaacgggatctgagtttcatgtcggtatcgttggcttagggtcaatgggaatgggagcagcactgtcatatgtccgcgcaggtctttctacctggggcgcagacctgaacagcaatgcctgcgctacgttgaaagaggcaggtgcttgcggggtttctgataacgccgcgacgtttgccgaaaaactggacgcactgctggtgctggtggtcaatgcggcccaggttaaacaggtgctgtttggtgaaacaggcgttgcacaacatctgaaacccggtacggcagtaatggtttcttccactatcgctagtgctgatgcgcaagaaattgctaccgctctggctggattcgatctggaaatgctggatgcgccagtttctggtggtgcagtaaaagccgctaacggtgaaatgactgtcatggcctccggtagcgatattgcctttgaacgactggcacccgtgctggaagccgttgccggaaaagtttatcgcataggtgcagaaccgggactaggttcgaccgtaaaaattattcaccagttgttagcgggcgtacatattgctgccggagccgaagcgatggcacttgcagcccgtgcggggatcccgctggatgtgatgtatgacgtcgtgaccaatgccgccggaaattcctggatgttcgaaaaccggatgcgtcatgtggtggatggcgattacaccccgcattcagccgtcgatatttttgttaaggatcttggtctggttgccgatacagccaaagccctgcacttcccgctgccattggcctcaacagcattgaatatgttcaccagcgccagtaacgcgggttacgggaaagaagacgatagcgcagttatcaagattttctctggcatcactctaccgggagcgaaatcatgatcaagattggcgttatcgccgatgattttaccggcgcgacggatatcgccagttttctggtggaaaacggtctaccaacggtacaaattaacggtgttccaacaggtaaaatgccggaagcaatcgacgcactggtgatcagcctgaaaacgcgctcctgtccagtggttgaagccacacagcaatcgctggcggctctgagctggttgcaacagcaaggttgcaaacagatctatttcaaatactgctctactttcgacagtacggcgaaaggtaatattggcccggttaccgatgccttaatggatgctctcgacacgccgtttacggtcttctctccggccctgccggtcaacggacgtacggtttatcaggggtatttgttcgtaatgaatcaactgctggccgaatccgggatgcgccatcacccggtaaatcccatgaccgacagctatcttccccgtctggttgaagcgcaatccacagggcgctgcggcgtcgtttcggcacatgttttcgaacaaggtgtggatgccgttcgtcaagagctggctcgcttacagcaagagggctaccgctacgcggtgcttgatgcgctgaccgaacaccatctggaaattcagggagaagccttgcgcgatgccccactggtaacgggcggttctggtctggcgattggcctggcccggcagtgggcgcaagaaaacggtaaccaggctcgcaaagcagggcgtccgctcgctgggcgcggcgtagtgctctccggttcatgctctcaaatgaccaaccgccaggtagcacattaccgtcaaattgcaccagcccgtgaagttgatgtggcacgctgcctctcaattgaaactctggccgcttatgcacacgaactggcagagtgggttctgggccaggaaagtgtacttgctccactggtttttgccaccgccagcactgacgcattggcagcaattcaacagcaatacggtgcacaaaaagccagtcaggcagtagaaacactgttttctcaactagcggcgcggttagcagcggaaggcgtgacacgctttattgtcgcaggcggtgagacctccggcgtagtcacacagagcctgggaataaaagggtttcatattggcccaaccatttccccggcgtgccgtgggtaaacgcactggataagcctgtctcactcgcccttaaatctggcaacttcggtgatgacgcctttttttcacgagcccaaagagagtttttatcatgagcgatttcgcaaaagtagagcagtctttgcgagaggagatgacgcggattgccagttcattctttcagcgcggctatgcaaccggttcggctggcaatctgtcgctgcttttacctgacgggaatttactggcgacaccgacaggttcatgcctgggcaatctcgatccgcagcggctttccaaagtcgccgcggatggcgaatggttaagtggtgacaaaccctcgaaagaggtgctctttcatctggcgctgtatcgcaacaatccgcgctgtaaagcggtggtgcatttgcacagcacatggtcgacggcgctttcctgcctgcaagggctggacagcagcaacgttattcgtccgttcacaccatacgtggtgatgcggatgggaaatgtcccgctggtgccttattaccgaccgggcgataaacgcatcgcacaggatctggcggaactggcagcagacaatcaggcttttttactggcaaatcatggcccagtggtttgcggtgaaagcctgcaagaagccgccaacaatatggaagagctggaggaaacggcaaagctgatttttattctcggtgaccgcccgatccgttatctgaccgcaggtgaaattgcggaattaaggagttaatgcaatgcctcgttttgcagctaatttatccatgatgttcaccgaagtgccttttattgaacgcttcgccgcagcgcgaaaagccgggttcgatgctgtggaatttctgtttccctataactactccaccctgcaaatccaaaagcaactggagcaaaaccatctgacactggcgctgttcaataccgctcccggagatattaatgcgggggaatggggattatccgcccttcccggacgtgagcacgaagcacacgcagacatcgacctggcactggaatatgcattggcgctcaattgtgaacaagtccatgtgatggcaggcgtcgtgcccgctggcgaagatgctgaacggtaccgggcagtatttatcgataatatccgctacgctgccgaccgctttgcgccacacggcaagcgaatattagttgaagcactcagccccggcgttaagcctcattatctcttctccagccagtatcaggcactggctattgttgaagaggttgcgcgagataacgtgtttattcaactagatacttttcatgcgcaaaaagtagatggcaacctgacgcatttaatccgcgactacgccgggaaatatgcgcacgtacaaattgccggactacctgatcgacatgaaccggacgatggagaaatcaactatccgtggctgttccgcctgttcgatgaggtgggatatcagggctggatcggttgtgaatataaacctcgtggcctcaccgaagaagggcttggctggtttgacgcctggcgctaattcgttaaatccctaattacaacgtacccatacatccccccatctacggatggggtaggttaactataactttcagacagggtttcccatgtccacaattacattgttatgcattgcgttagctggcgtaatcatgctgttgctgctggtcatcaaggcaaaggtacaaccattcgttgctttgctcctcgtcagcctgttagtcgcacttgcggcaggtataccggcgggcgaagtgggtaaagtgatgatcgccgggatgggcggtgtgcttggttccgtcactattattattggtctgggcgctatgctggggcgtatgatcgaacactctggtggtgcagagtcactggctaattatttcagtcgcaagttaggtgacaaacgaactatcgctgcgctgactctggcagcgttcttcctcggtattcccgtcttctttgatgtcggctttattattcttgcgccaatcatttacggttttgccaaggttgccaaaatatcgccactcaaatttggcctgcctgtcgctgggatcatgctcactgttcacgtggcggtaccgccgcatccaggccctgtcgccgcagcggggttactccacgcagacatcggctggctaaccatcatcggtattgcgatttctattcccgtaggggttgttggctactttgcagcgaaaataatcaataagcgccaatatgcgatgtcagtagaagtactggaacagatgcaactggctccggccagtgaggaaggcgcgacaaaattaagcgataaaataaatccaccgggcgtcgcgctggtcacctcgctaattgttattcctatcgcgattatcatggcgggtacggtttccgcaacactgatgccgccttcgcatcccctgcttggtacgctacagctgatcggctcaccaatggtagctctaatgattgcgctggtgctggcattctggttattggctttacgtcgcggctggagcttacaacacaccagcgacattatgggctcagcgcttcctactgcggcggtagtgattttggttactggtgctggaggggtatttggcaaagtgctggtggaatcgggcgtcggcaaagcccttgccaacatgctacaaatgattgacctgcctctgttaccagccgcatttattatttcactggcgctgcgtgcatcgcaggggtcagcaaccgtagcaatactgacaaccggcgggttactctcagaagcggtgatgggattgaatccgattcagtgcgtattggtgacgctggcagcctgctttggtgggcttggtgcgtcacatattaatgactcagggttctggattgtgaccaaatatctggggttgtcggtagcagacggtctgaaaacctggacagtgttaacgaccattctcggttttaccggattcttaattacctggtgcgtatgggcggtaatttgaccttaataaaaaggtccgatgggcatcggaccttttattgtgcacagaaaaggccagcctcgcttgagactggcctttctgacagatgcttacttactcgcggaacagcgcttcgatattcagcccctgcgtttgcaggatttcgcgcaaacggcgcaggccttcaacctgaatctggcgaacacgttcacgggtgaggccaatttcacgacctacatcttccagtgttgccgcttcgtaccccagcaaaccgaatcgacgtgccagcacttcacgctgtttggcgttcagctcgaacagccatttgacgatgctctgcttcatatcgtcatcttgcgtggtatcttccggaccgttctctttttcatcggccaggatgtccagcaacgctttttcggaatcaccacccagcggggtgtctaccgaggtaatgcgctcgttaagacgaagcatacggctgacgtcatcaactggcttatccagttgctctgcgatctcttccgcacttggttcatggtccagcttatgggacaactcacgtgcggttcgcaggtaaacgttcagctcctttacgatgtgaatcggcaaacgaatagtacgggtttggttcataatcgcccgttcaatcgtctggcgaatccaccaggttgcgtatgttgagaagcggaaaccacgttccgggtcaaacttctctaccgcgcggatcagccccaggttgccctcttcgataaggtccagcaacgccagaccacgattgccataacggcgggcaatttttaccaccagacgcaagttactctcgatcatccggcggcgagaggcgacatctccacgcagtgcgcgacgcgcaaaataaacttcttcttcggccgttaacagtggtgaataaccaatctcaccaaggtaaagctgagtcgcgtccaacacacgctgtgtggctccctgcgataacagttcctcttcggccaaatcgttatcactgggttcctgttctactaaggccttttcgtcaaaaacctcaactccgttctcatcaaattccgcatcttcatttaaatcatgaactttcagcgtattctgactcataaggtggctcctacccgtgatcccttgacggaacattcaagcaaaagcctggttccgccgatttatcgctgcggcaaataacgcagcgggtttacggatttccccttgtaacgaatttcaaaatgcaagcgtgttgaactggttccggtgctacccatggtcgctattttttgccccgccttaacttcttgttgttcccggaccagcattgtgtcgttatgggcgtaggcactcaggtaatcatcattatgtttgatgataatcagattaccgtagccgcgcagcgcgttaccagcataaacaacgcggccatctgcggtcgcgataattgcctgtcctttgctgcctgcgatatcaatccccttgttgcccccctcagaagcgccaaaggtttcgatcactttgccctcagtcggccagcgccaggtggagataggcgtactggttgatgtactgctgacagtcggctcggttgtgcttgctgttggtaccgttacaggcgctgtgaccgtggtcgcagttggcttgttgttcggcaacattttgttagcactctgttcacccgaagactcagaatacgtaattgtcggttgcgacgcaacagcaacggtggaattttgtgcaggcttgatcacaactccttgctctgctgcgtcggcctgggtaatggcatttccgccagtgattggcgtaccggaagcattacccacctgcaaggtctgaccaacgttcagcgcgtatggtgcctgaatattgttgcgctgagcaaggtcacggaaatcgttgccagtaatccaggcgatatagaaaagtgtgtcgccttttttcacggtataggtactgccgctataactgcctttcggaatgttcccatactgacggttatagacgatgcgtccgttttccatctgtaccggctgctgagctactggctgcactggctggatttgcggttgttgagtagcctgaatttgtggctgctgcaccggctgaatttgcggttgctgcgctgtagacgtcgtccccattttcggcggcggcgtaatcaacataccagaattagtatttgcaggcgcattgccattaacggagctgaccggtgccggtggatttgaagtgtcagaacagcctgccagccatagcgaaaccagtgacaaagccgcaatgcggcgaacggtgaattttgggcttcccgcgctcatttatcccccaggaaaaattggttaataaccagtgacataattaccgtgcaaggcaccctactgaacactggaaaagatgttcacgatacgctgacctgcggcaaaataaccaggaaaaatccaggtatttcctcacgttttaagccagctcacccttcactaaagggacaaagcgcacggcctccacggtatcgataataaattcgcctccccgacgacgcacccgtttcaaatactggtgctcctcccctacgggtaagacgagaatcccgccttcgtccagctgcgtcattagcgcagttggaatttccggcggtgccgccgtaacaatgatagcgtcaaacggcgcacgtgcctgccaaccttgccatccatcgccatgacgggttgaaacattatgtaaatcaagatttttcaggcggcgacgtgcctgccactgcaagcctttaatccgttcaaccgagcaaacatgctggacaagatgcgccaggattgccgtttgatatcccgaaccggtgccaatttccagcacccgcgactgcggcgtcagctcgagtaattcggtcattcgcgccaccatatatggctgcgaaattgtctgcccctgacctatcggcaaagcgatattgtcccaggctttttgttcaaacgcttcatcaacgaatttttcacgcggcacggcggcaagtgcattcagcacctgctcatcctgaataccttgcgcacgtaattgatccagaagtgcttgtacgcgtctgcttaccattgcgtgccaactcccacgctgtttaaccagtctgaaaccacatcttgcgcgctatgcgcagttaaatccacatgcagcggcgtgatggagacatagccctcatctaccgcagcaaaatcggtccccggaccagcatcacatttaccgcccggcgggccaatccagtacagcgtattgccgcgcggatcttgctgcgggatcacctgatctgccggatgtcgtgtaccgcagcgcgtcacgcgaatacctttgatttgatccaagggtaaatccggaacgttaatattaagaatacgcccggtgcgcagcggctctttacacagtgcgcgcaaaattgaacaggttaccgccgcggcagtgtcgtaatgtttatgcccgtcaagcgagacggcaagcgccggaaaacctaaatgacggccttccatcgcggcggctaccgtaccggaataaataacatcatcccccagattcggcccggcgttaattccggacacaacaatgtccgggcgcggacgcatcagagcattcacgccaagatagacgcaatcggtcggggttcccatttgcacagcaatatcaccattttcaaaggtaaacgtgcgcagggaggattccagtgtcagagaatttgaagcgccgctgcggttacgatcgggggcgaccacctgaacgtcagcaaactcacgcaaggctttcgccagcgtttgtataccgggtgcatgtaccccgtcatcattactcagcaatatgcgcataatcacctgttgtgttgataagttccctgacaacgctggttgcaaaactacccgccggaagccagaaacggatctctacggtgacgtcatcccaccaattccagcttaattgttgcggatacagcagcatcgctctgcgcgcggcttcaactttttcgcgcaccagtaaagcttgtaattcagtttctgcggcgacagctgcttgttcgaatgccagcgcttcacgctgagttccccattcgccactgcctggcaatgcggcggttatcatcaactctttatcgttgacgcgacgctgtaattccgccagttcttcggtggttgcgacaaaccagctaccacgtccggctaattgtagcgcatcgccgtcaacaacttgattaacgtctgcttttttgaggcgctcagcaacaatctgattaaacaacgcactgcgggctgccgacaaccaaaaactccgtttattgcgatcgcgcaccggagtattggtttgcgcccagcgctgcgccccctgcaagttgctaccgccaatcccaaaacgttgggcaccgaagtagttcggtacaccttttacgcaaatatcgatcagacgttgttcaacgtcatcgcgattgctcacttcgcgcagaaccagggtaaaggcgttacctttcagcgcgcctaaacgcagcttgcgcttgtgccgcgcatactccagcacctggcagccttccagttgaaaggcgctcagatcgggcatttccttgcccggcacgcgagcgcataaccactgttccgtaacagcatgtttgtctttttgcccagcgaagctgacttcacgggcatgaattttcaggaatttcgccagtgcatccgccacaaaacgggtattgcagccgtttttgaggattctaaccagaatatgctcaccttcaccatcaggctcaaagcccaaatcttccaccaccacaaagtcttccggattggctttcagcagcccggtgccttgcggtttaccgtggaggtaagtgagattatcaaactcaatcattttgttgccttaatgagtagcgccaccgcttcacaggcaatcccttccccacgtccggtaaatcccagtttttccgtagtagtggctttcacgttaacatcatccatatggcagccgagatcttcggcaataaacacgcgcatttgtggaatgtgcggcaacatcttcggtgcctgagcgatgatagtgacatcgacgttgccaagggtataacccttcgcctgaatacgacgccaggcttcgcgtagcagctcgcggctatcggcacctttaaatgccggatcggtatccgggaacagcttgccgatatcccccagcgccgccgcgccaagcaatgcatcggtcaacgcatggagcgccacgtcgccatcagaatgcgccagcaatcctttttcgtaaggaatgcgtacgccaccaatgataattgggccttcaccgccaaaggcatgtacgtcaaaaccgtgtccaattcgcattatgtattctcctgatggatggttcgggtgaggtaaaactcggccagtgccaaatcttccgggcgcgtgactttaatgttatccgcacggccttcgaccaactgaggatggaatccgcaatattccagcgccgaggcttcgtcggtaatagtcgcgccttcatttagagcgcgcgtcagacagtcatgtaacagctcacgagggaaaaattgcggcgtcagcgcgtgccataagccgttgcgatcaacggtatgagcaatggcatttttgcccggttcggcacgtttcatagtatcgcgcactggtgcggcgaggatcccccccgtgcggctggtttcgctcaacgccaacaatcgcgcgaggtcatcctgatgcaaacaaggacgagcggcgtcatgcaccaatacccactgcgcgtcgccagcggctttcagacctgccagcacggaatcggcacgctcatcaccgccatctacaacggtgatttgcggatgattcgccagaggaagttgtgcaaaacggctatcgccaggacttatggcaatgacgacacgtttcacccggggatgcgccagcagcgcatgcaccgagtgttcaagaatggtttgattaccgattgagagatattgcttaggacattccgtttgcattcgacggccaaatccggccgccggaaccacggcgcaaacatccaaatgagtggttgccatgttaattcccgggctgatttatcgattgttttgccccgcagactgtgcgcgcttcgacgcgtcaggcaccagacgataaaaagtttcgcccggcctggtcatgctgagttcattacgcgcacgctcttcgagcgcctcctggccgccattgagatcgtcaatttcggcaaaaagttgatcgtttcgcgctttaagtttcgcgtttgtagcttgctgtgccgccacatcatcattgacgcgggtatagtcatgtataccgttcttaccgaaccacagcgaatactgtagccagaccagaatagccagcaacagcagcgttagtttacccatcctgccccctgaaaaacggcatcatcatcccatgcatccgaagacgactctacatcctctgttggggataccgcgacaacgcgggcaaatgtaccacatttgtccattgttacgtatacccagggcgtgcagaacataatctcattattagttacggtttgaattatgaacagaggagacgggaaagtacaaattagcccagtagccacataaacagtgcgccaaacataatgcctactgtcaccagggtgaaaacaatactgtagcgtagctttccgtccatcaatgaatgcagcgcaatccccaccactaccgcgacgggcatcagcgccagaaagaaaggccaggtgtagataaagaagaacagcgtgttagagccataaatcaacatcggcatcgccagcgcaaataaccaggagataaaaccgaccacggcaccaggcagtgaccatgtggtttcttcatcctcagtaaggctgtcgttatttgttagtgtaatgttatggctattacgcatatttgatcctgttactttgacgaaccgggcatggaaacccggtggtgtctcaggatctgataatatcgttctgtctcaacagatctaataattgctgtaccaaatttgttactaattgttcaccattgagatgaatttctgccgattcaggcgcttcgtaaacggaatctattcccgtaaagttgcgcagttcaccggcacgcgctttcttatataagcctttgggatcgcgggcttcgcaaatcgccagcggcgtatcgacaaacacttcgataaagcgcccttctcctacgcgttcgcgaaccatctggcgttcggcgcggtgtggcgagataaatgcggtcagcaccaccagtccggcttcaaccatcaaattcgccacttcaccgacgcgacggatattctctttacgatcggcatcgctaaaaccgagatcgctgcataatccgtggcgaacattgtcgccatccagcagatacgtactgacgccgagtttatgtaacgcctcctccagcgccccggcgaccgttgatttaccggacccggagaggccggtaaaccacagcactacaccacgatgaccgtggtgtagctcgcgttgttgcacagtgaccggatggctatgccagacgacgttttcgtcatgcagcgccattatttatcccccagcaaatcgcgcgcgccccagtgcggaaagtggcgacgaaccagagcattcaattccagttcgaatgcactgaattcagatggcgcagcagttgcctggctaactggctcgtgcaccataccggcacccacggtcacattgctcaggcgatcgataaaaatcagcccacccgtcaccggattttgttgataacgatctaacaccagcggctcgtcaaaagtgagatccacgaggccgatcccattcagtggcaggttttcaacttcacgctgggtaaggttattaatatcaacctgatagcgaatgccatcaacacgcgcgcgcgtcttcttaccggcaattttgatgtcgtaactctgccctggagaaagcggctgttccgccatccataccacatccaccgacgcgctctgcaccgccggtaacgcttcgtctgccgccagcagcagatcgccacggctgatgtcgatctcatccgtcagcaccagggtgatcgcttctccggcaaaggcttcttcgcgatcaccatcaaaagtcacgatccgcgcgacgtttgattccacaccagagggcagcactttgacacgttgcccgacttccacgcgaccggatgccagcgttccggcgtaaccacgaaaatcgagattcgggcgattaacgtactgcaccgggaagcgcattggctgagcatccaccactcgctggatctccacggtttccagcacttcgagcagtgtcggaccgctgtaccacggcatactttcactttgcgatgccacgttgtcgccttccagtgcagagagcggcacaaagcggatatccagattacccggcagctgcccggcaaaggtcaaataatcttcacgaatacgggtgaacgtctcttcactgtaatccaccagatccattttgttgatcgccacgaccagatgtttgatccccaacagtgtggagataaaactgtgacgacgggtttgatcgagcacgcctttacgggcatcgatcagtaagatcgccagttcacatgtcgatgcgccagtcgccatattgcgggtgtactgctcgtgccctggggtgtcggcgataataaatttacgcttctcggtagagaaatagcggtaggccacgtcaatggtgatgccctgttcgcgctcagcttgcaggccgtccaccagcagagccagatccagcttttcgccctgggtgccgtgacgcttactgtcgttatgcagcgatgagagctgatcttcgtagatttggcgggtatcgtgcagcagacgaccaatcagagtacttttgccgtcatcgacgctaccacaggtcagaaaacgcagcaggcttttatgttgttgcgcaatcatccaggcttcgacgccgccttcattggcgatttgttgtgcaagtgcggtgttcatcttaaaaatacccctgacgttttttcagctccatagaccccgcctggtcgcggtcaatcacgcggccctgacgttcactggtggtggaaaccagcatctcttcgatgatttccggcagtgtttgtgcatttgactccaccgcaccggtcagcggccagcagcccagcgtacggaaacgcaccatccgttttttaatcacttcgcccggttgcaggtcgatacggttgtcatcaatcatcatcaacataccgtcgcgttccagaaccggacgttccgcagcgagatatagcggaacaatgtcgatattttccagccagatgtattgccagatatcctgctcggtccagttagagagcgggaagacgcggatgctttcgcctttgttaatttgcccgttgtagttgtgccacagctccgggcgctgatttttcggatcccagcgatggaagcggtcacggaaagagtaaattcgctctttagcgcgggatttctcttcgtcacggcgcgcaccaccgaaggcggcatcaaaaccgtatttgttcagcgcctgtttcaggccttcagttttcataatatcggtatgtttcgcgctgccgtgcacgaatggattaatccccatcgccacgccttccgggtttttatgcaccagcagttcgcagccgtaggctttagcagtacgatcgcggaactcatacatctcgcggaatttccagccggtatcgacatgcagcaacgggaaaggcagcgtacctggataaaacgccttgcgcgccagatgcagcatgacgctggaatctttaccgatagagtagagcatcaccggatttgagaattctgccgccacctcgcgaataatgtggatgctttccgcctccagttgccgcaggtgagtaagtcgtatttgatccataaccgttcctttgcaataccgctattttcttgccatcagatgtttcgactatagggagcgtaagagaacgaatgaaattaccaattagaatgagtagttccttaacggaataacgatttggcaaagctaatatcaaaaagtgcttaaggcaccggatttcgggcgtttaggaagatttgaaattgttttagcgcagcggcagtttcatactatggcggtaaaaaaatttgcatggtatttaaggactcactatgttttccgcattgcgccaccgtaccgctgccctggcgctcggcgtatgctttattctccccgtacacgcctcgtcacctaaacctggcgattttgctaatactcaggcacgacatattgctactttctttccgggacgcatgaccggaactcctgcagaaatgttatctgccgattatattcgccaacagtttcagcaaatgggttatcgcagtgatattcggacatttaatagtcggtatatttataccgcccgcgataatcgtaagagctggcataacgtgacgggaagtacggtgattgccgctcatgaaggcaaagcgccgcagcagatcatcattatggcgcatctggatacttacgccccgctgagcgatgctgacgccgatgccaatctcggcgggctgacgttacaaggaatggatgataacgccgcaggtttaggtgtcatgctggaattggcagaacgcctgaaaaatacgcctaccgagtatggtattcgatttgtggcgaccagcggcgaagaggaagggaaattaggcgctgagaatttactcaagcggatgagtgacaccgaaaagaaaaatacgctgctggtgattaatctcgataacttaattgttggcgataaattgtatttcaacagcggtgtaaaaacccctgaggcagtaaggaaattaacgcgcgacagggcgctggcaattgcgcgcagtcacggaatagccgcaacgaccaatccgggtttgaataaaaattatccgaaaggcactgggtgttgtaatgacgcagaaatattcgacaaagcgggcattgctgtactttcggtggaagcgactaactggaatcttgggaataaggatggttatcagcaacgcgcaaaaacacctgccttcccggcgggaaatagctggcatgacgtaagactggataatcaccaacatattgataaggctcttcctggaagaatagaacgtcgctgccgtgacgttatgcggataatgctacctctggtgaaggagttggcgaaggcgtcttgatgggtttgaaaatgggagctgggagttctaccgcagaggcgggggaactccaagtgatatccatcatcgcatccagtgcgcccggtttatccccgctgatgcggggaacaccagcgtcaggcgtgaaatctcaccgtcgttgccggtttatccctgctggcgcggggaactctcggttcaggcgttgcaaacctggctaccgggcggtttatccccgctaacgcggggaactcgtagtccatcattccacctatgtctgaactcccggtttatccccgctggcgcggggaactcccgggggataatgtttacggtcatgcgccccccggtttatccccgctggcgcggggaactctgggcggcttgccttgcagccagctccagcagcggtttatccccgctggcgcggggaactcaagctggctggcaatctctttcggggtgagtccggtttatccccgctggcgcggggaactctagtttccgtatctccggatttataaagctgacggtttatccccgctggcgcggggaactcgcaggcggcgacgcgcagggtatgcgcgattcgcggtttatccccgctggcgcggggaactcgcgaccgctcagaaattccagacccgatccaaacggtttatccccgctggcgcggggaactctcaacattatcaattacaaccgacagggagcccggtttatccccgctggcgcggggaactcagcgtgttcggcatcacctttggcttcggctgcggtttatccccgctggcgcggggaactctgcgtgagcgtatcgccgcgcgtctgcgaaagcggtttatccccgctggcgcggggaactctctaaaagtatacatttgttcttaaagcattttttcccataaaaacaacccaccaaccttaatgtaacatttccttattattaaagatcagctaattctttgttttcaaacaggtaaaaaagacaccaaccttaaaccatccaaatctaccggggtacgcctgtttaacccaaatgtctggaactcaaatcccgtttccgtattcgttgcccatgccatcactacattgccttcttccgccagtccagctatttgttcccagatcatttcacgaatttttgcggatacatcacctacatatacccctgcacgtacctccaacaaccagatggctaatctgcctcgtaagcgcggaggtacattttcagtgaccacgaccaacatactcatttcagctactccgatggcctgcatctcccagtgaaacaggaagcggaatggcaacaggctgtgcatcttcaggtggggccggcggttgtatttctccagcggcaagcacgtcctctataagcggaatcaatttggctaatgttttactactgcgaaaaatatccctgcacgccaaacggacttcccggtccggctcaccagggttacgacgcgctatctcaaaagctttcggtacaacagtgtcaaatttaatgatgtctgcaatatcgtaaacaaaggaaagaggctttcctgtatgcacaaacccaatagctggtgcataaccagctgcaagtatcgccgcttcagttacgccgtataaacaggaagttgcagcgctaatgcattggttgatcgtatcgcccttttcccagtctttcggatcgtagcgacgtccattccatgtcacgccgtattgcttcgccagaagtgcgtaggttgcccgcacgcgactgccttctatacctctgagttgctctacggagcgccgggcaggcgcaggttctccaaaccgaagttcaaacattttacgtacgaccttcagacgcaaatcttcatccagagcaagttttgcctgatagagcagcttatctgaacgcgcacctccaggctgaccagaagcataaacacgaacgcccgcttcccccacccataccaacaatgttccaacttgcgcagccaggcgtacagctgcatgcgaaacccgtgtaccaggttccagcatgatgcaggcaaccgagccaacaggaatatgagtgcggatccctgtcttgtcgataagtacaaacgcgccatctattacatcgatctgcccatattgcagaaagatcatggagacgcgatctttgagtggaatgggattaaggggaagccaggtcattttattacacctcaatcacagtggagccaaagatagcaagccacatcccatcgatttagctggcccaataccttgctgtacaagatctattaacgctggcgcgtcgttgatggtgagcacaccttcaaagcaaaccgtttggatctttccacttttaccatcaccagaaaaatactgtggccgttccgatatgggatgcacatcttcaacgcgcgccgcattgcccaatttacgttgcaaccacgcgatttgttctgcttcttttattaacggaacccgacagcgtttaatattccctttactgtccaggcgcttttgattgtcgagaatagttttgatcggatttgcccgaagccgaaaatagagtggaacaccaacctgaagttgaaattcaacctgtttagttttaatgactgtcgcaacggcagttgaaacaggcatttgcgctgactgcaataaaacatgacagccttctggtgtgtttcgcttctcaacatgaaaaagaaaatcacgagcagcatccggtctgtttggaaataaatgccataatccctggtgaagttggtaaagatccctgctccaggccctggcaatgatgactttactgagatacatccatacctcctttaatcacataccattctcgggaagcaaattgtcgaggcaaggtgatcatcggttcgtcgcgcgccgtaaattttaaatgatgccctgtaactgattcctcactatatatatcgccgccaacgggctcataatttaatagcgccttctgaggatccgatgcctgacatgtccccaaaaaaagcgggtgtgttagtgggcaacttctccgccccaggtaaggtgtataccgaggctttaatactgctttttcaagttctgagataaccatcgttgcatggggtgttaaccagagagcgacggtaaaggaggcatcacataaatattcgcgccatgtttgaatcgtttcatgacttttcaaaccacggtaatcttctcgcgctccaaggactgtatggtaatcacgcaaccccgttacagacacacgacgatcgtcaagaatgagttcatcgcagcgcactgcaaattgcacactctctgataacgcctgtaatgaagaagtatcatcacgttggatcccaagacaagccccgagtagccctaataacccgcttcgggtcggaaatcttccggtaggtcgcgttccttcaaaggtcggctgcccccaggcttgcattggcccagcaagccgcaagatcaaataagatctcatgttcacgcctcgccattattacgaacccaggattttaactgttctaaagtaggcatttgtttaacttgagcagtaattgggtctacatcagataagctgaattgcgcagcagctccgttcagaccatatccattggcaacgcgatcccaatattgattaaacgcctgtatagacggttgcaaaaagccatctttcgctttaaccgctttttcaaaagcatttgccatagaaagtggcatatcggagaaattaaccattaccatatccgcagggttaaaagcggcataagtacgctgttttgctccagggacctctgttgccagcatatgaacaacatgggttgcaatttccagagcctgctccctggaggcaccacctaaattttcctgaagttgagcgaggttaatgttggcataacgataaaaaacacccgatgaaaattcctgagttcccagatgtgcagaaccttgttcctgtaaatcatctacagcggtgaaccagtcaatatcagaatcaacctgatgagtagtgatcgcatgcgcaatggacattgcaccatcaacttttcccaactcagtcatcatgccgctggttgccattcttccactaagcgcaatatcaacaccctgctgtaaattcacacgtatggcggcaatatcttccttaagaactttgagcagctttttatcatccagattatcagcctctgcttttgcaacctgctcacagaaccaggctatttctcccacaacccagggagtaaccgcatcggcagaaatcttttcggcttcatcaactgatttaccggagagcagcgctaatgtcttatcgatgattttttggtcaaaacgttcaccaagtttttgccgaagaacatcacgtaattgtgcaagatgaatggttctgagactggattcaccaatattttgtgcgtaataaccacttttacgcatcgcacgtttaaggctttgacttgaaattcttactcgtcttttgccgccgaaaatagcgtctttctgcatgttcatatcgtcgcggttcagacatgaagggctgtgagagatcagaacatgaatattgataaagttagacatagaaaggtttccttacgcatttttgtttgtggtcaatacaaaatcttccagaagttgctggcgttcgcgctttccccaccaggtcaacatcctggccattaatggccagtcaagtacgggttcggcgtgagtaagtaatcgacgtaactggaccatatcggctgttctgtcagcccgaattaattgaaagatacggcgctcgttaattcttccactattggctaaagctcttcccaacgagatacctgttgtttgctccgattttttgtcctgatgtcggatgacattctttcctgcgctcaggcaaaacaccatgcgcaaaagagcctgctggtgacgtgggttttcccaaccaaaaggttgcaccagcctataaaacgcagggatatcgcgtaattcatcaggttctgaaacacgtctaatttgcgcacatgatccattatccagttgttgccaggctcgatataaagccattgcatcaatttcatcagccatttgatggccctccttgcggttttaactcccgtaaatgtttgtatagcgtggcgcgggcaagcgctaatgtgcttattaatttaggatgatgtgcatagggagctacagattgattaaatagcatttcacacaattgatgaagtttgtctcgtaaatcagctattacctcatcagcctgggaaaaattaacattcgccagtacatcgggaattaataattcactctgtcgatagaaatgcctttctgcagtctcatgaacagagactccggcccctttgaagtctttatttttaaacccttctgcaaaggtatataacgccttgcgtaaggctgttttatatcccaaaccaacagtcactatttcgtttatcacattgccgtattgttgccacccctgattaaacatcaacacatcatgacgccgttcaagaatagatgcttgattattacgatatccccccataatcaattcaagaggactttgcggcgcaatatttctgaattgattcacaaccgccgccacgcgatttccattttcattttgaataatcttatctaccacaactcggctgatttgtgtccatgatggtgcggaggtggtgaaagcaagaaatttttcctcaacctcccctttcttgactgttaccagacaaggggaatgcggatggggccatagcccattaactgtaaaggtaaatttttccttaagaaaaccggtataacgcaaattgctttcctgtccacagcaagaacatttaccaatcccaatgggatcgcataattcaatatgcgctggttgccagaatagaccacggacaaacccaattgacgaagcaggtatagactcattggacttgataggtttaatccaggtaggttggttttccgtatgtgattcattaggaaattgtttttgaagacgaggtaatgtgaggacattgagtaacaccgttgaacgaagatcgatcccacgtacgaacgttgttacaggtgttcctccacgtaaaccgcttttaaaaccaccaccaaaacctggtgcctgattcgcctggttgaataacgcaatcgcagtgcatccaccacataatgcttcaccctgccccggttgattgacaaatgcacaattcgtcgcgccgcttaccccagccaacagtttttccattggagtcacatcatttgctttgacacctttggtctgcataaagggatgttctgcgtgattaaggtagaacatatctatccacggcgcgatgagttgttgaaactcatcttcagtgagcggattcattatgcgatgtcgaaattcaacgtcatcttttgccggggcgataatttgcccaatgcaaaccagcagtgctaaagcggccagttccatatcgtcacggggcaaacttaatcgccactgatctctactgcagtatagcgattgcagatttatgatttggactttccccccgtttcgcgggcgtacagggatccagttatcaataagcaaattcatttgttctccttcatatgctccgacatttctcctgcatttctatacgtcggcacacttccgttatcggtaaaaacaaagaaaaaatacggcgtaattaattcaataatcacattcactgcaaaaatatattcattggtttaatacaattaacctatacatatattaagatgtgttgaattgtttaaagacaataatgcatgcatttcaaatctgcaagttattcgttttattattaaagaaacttttagttataataattaccatgaattttattacataaaatattcatactgtgaatataaaatctcataccgggaaattaaaagaagatgtacattgtgcaccttccctacttaagtagggataaaccgttattggtcttattatcgtcattgataacaatcattcccgaagttatttgggatttgcagggatgactctggtcatcccttcatcccctgtataggtaataacaatactgttaccctgccagacccatccatccagattctgtttcccttccagccaaagtaacccatcttcatctactacttcagaaaaactacgtttccaggtgaagggtacattgacgcgattaagtgcaagcgcctcatactgctgttcatgacttaggtcctcgtagacctggccatcgagcagttgtttacctgaagacgtttgtacataaggcaataatggcaggctcatttccccatccctcgttaccgcaagaatggtttcatcgttatcctgcaagctatattcttcagcccactgcaggaccttgcgagccttgaaccttttttcacactcggcgctttcaaatttatccatgccattgccgacccattctggctcatccatttccgcatcatcgtaaatgctatccagccattgccggtaagcatcagggaaaaataaggatgctccattaagctcctcaatatgttgctgcgtccgccacatgactctaacgttgctataaatatgctcatgtcgtccgtaaccctcgccatcaggcagcaaaatggtggcaacaggaatctcaaaaccagcgggacgatatttgcgatgatggcgatgtaaacggcccaatcgttggaaaagcaaatctgcaggacaatgctgagtaattaaccaatcaaaatcaacgtcgagtgattgttccacgacctgggttgcgacaagtatccgtccaacatttcgcttcccatttttgccgaaattgctaataactcgattctctttttcacgacgatcgttcagcgtaaagcgcgcatgaaacaaatctatatctacttgcgtgttatttagctcctttagccgttggtagcatacttgtgcaacgtcaaccaaattgcaaataagacagacctgtgcacccgcgtttgccgctgcgatcattcgctctaacatcgtaaggtcaggtaacatgtcagctaaacaaataggttctggctgaatcgaaaagcggggcgggagttgttctggatgagctagcagatcaaaacgttgcgcaccattcacacctcgccagttaatgagtggatatgcggagttattttccactggatctgtatgcagaccataagtatccagaagtttctgtttttgtttcattggtagggttgcggaaagaagaataacactccctcccacatcagcctgagccttgagcactgcctccagcaagccgttcatataggtgtcgtaagcatgaacttcatcaacaattaaaacacttcgaccaattcccaaaccacggataaagcggtgtttaactggcaataccgatatcaacacctgatcaatcgtgcaaacgccgatttgcccaagaaacactttcttattgctttgtgacaaccactgacaacactgaacccacgcttcttcttgcccctgttcagtaatcgcgcgtgattttattgattgaaagaggtggttaaaccgtgaattgccatgagcaagaataagatttggggatgaaaataagtggctcgcgctcgcttccattctcgtaagcatagcattcgcggtagcttgtgttgggagggcaaaaataacactatccgcaatttgttgatcaataagtttccaagcataggccagcgctgtttccgttttaccggagcctgtaggtgcctctattaccgtcagcccgggagctactggaagagcatcaactaacacctgtaattgtctgggttgatagccattgtccagtagtgcatgaacaccttcataacatcgcttatttgatacaagtccactcaactccaatacccggctcgcatcctgctgtcggtcctggaaatacgttctcagagcatttatgtcggaaggcgcatcctcattaaacagaaaggtattcgttgtagtccaggagcctaaccagtcagcaagcgagcaaaaacctgctaacagtgatgaacaatcaggtggtatatcgtttatagataaccccgctggcgttaaaaataatgcttccagtacagatatccactcctcacgagcctgtttatcttgcgcagcataagatgccagagaagctggcatttcccaacgcgacttatcttgatcctgggaatgtaatataaaaccatgatgtcctgtaacggcctctacccatggaaaccaggactcataaggatgaggagcggcatcaaaaaaactgaaaaaatccccgagagattgctctgaaagtgaatcctggttaaaccaatacagaccggctgcaccatgattaaatttacggcacatttgtgttgatggaccattaagtgatggcgttgcaggatttaatttcagccaactttctgctgatttatattggaatcgtatatcaaactttccaatatcatgaagagcaatgaaaaataacagccaggccttcaccctctgttttgatagcatttcatttcggcaaaaagtattttgcagtacgactgattgatcccaccagcaatctgcaacagcagcaacatcaaggcaatgataaattaacagatgaatatcatttcctttcgtcaagctttttgaggattttccccagtaatggcatatatatttaaaaggttccattaatagcctccctgtttttttagtattatcgatgatatcagcgggctatttttcgatgctgctcataaatatcgaattacagtgatatacacatgtcttgcctccctgcaaagaagagactaacattcgaattgtttgggttcgaacgctggcctcaggttgatagaaatatcgcctggggcttttgtccatctggaacctcgcgaatgcttaacgccagacagcctcaagcacccgacgccattctatacctgataattcttcccgcggcgttcacgtttaaaatcaggaatgctgctcgcaaaataaaaacgcccccatcatttctgacagaggcgtttaatttgtccggcaatatttacccttcgtgtaacccacattccctttttaagccaaagaaacgcgtttcttcttccgccatgccgggttcccatttacgggttgtatgggtatcgcccaccgataaatatccttcatcccataatgggtgatatttcaggccatgtttttgcaggtactgataaatagttcggttatcccagtcgataatcggcagcactttaaatacgccacgctgaattgccagcaccggtaaattggcacgactgccggattgttcacggcgcaggccagcaaaccaggtttgcgcattcagttctttcagagcccggttcatcggttcgactttgttgatgtcattgtacttttcaatgccttcaacgccctgctcccacagttttccgtagcgtgcttcctgccaggctgcgctttcggtagcacggtacactttcaggttgagcttgagtttgtccgttaactcgtcaataaagcggtaggtttccgggaacaagtaacccgtatcggtgaggatcaccggaatatccgggcgaatttgattcaccagatgcaggctcaccgccgcctgaatgccaaagctggaagaaagtacatattcaccgggcagattatccagcgcccaggctacgcggccttcagcgtccagtttttccagttcggcgttagtttccgccagcgccagaatgcgatctaccttcggcagttcgttcagggcgtttagatcgagtttggacatagattcctcactgtttgccttgcctgatgcgacgctcacgcgttcttatcaggcctacaagaccgggctgatggttaatcccacaaatcacgcgccggatcgagcaccgggcgaatgatgcccgcacgcaccgtaaagtcgccgaagccttcacccgcttcgcgctctttcgcccagcgccctatcagttcatcaagcgacgccaggatttccggctcggtgatgttttctttatacatccgtgggatacgtgtcccaatgcggttgccgccaagatgcaggttgtagcgacccggcgctttacccaccaggcccacttccgccagcatcgcgcgaccacaaccgttcgggcagcctgttacacgcatcacgatatgctcatcgctgacaccatgtttcgccattaaattatcgatgttgtcgataaaagacggcaggaaacgctctgcttccgccatcgccagcgggcaagtcgggaatgacacgcaagccatcgagttttcacgctgcggcgtgacggcattcattaacccgctctctttggcgatcttctcgatcttcgctttctcgctttccggtacaccggcgatgatcagattctggttcgccgtaatgcggaaatcgcctttgtggatcttcgcgatctccagcaggccggttttcagcggacgcgccggataatcaaggatgcgaccattttcgataaacagcgtcaggtgccagttatcatcaatgcccttaacccagccaatacgatcgcctcgtccggtgaactcatatggacggatcggttcaaatttgatccccgcgcgacgctccacttccgctttaaacgtctcaacccccacgcgctccagcgtgtatttggttttggcatttttacgatcggttcggttaccccagtcacgctgagttgtcacgacggcttcggccaccgccagcgtatgctccagcggcagatagccaaactcactcgcggtgcgggcgtaggttttcttgttgccgtgttcgatggaaagcccaccgcccaccaacaggttaaagcccaccagcttgccgttttcggcgatcgccacgaagttcatgtcgttggcgtgcagatcgatatcgttctgtggcgggatcactaccgtggttttgaatttacgcggcaggtaggtctggccgaggatcggttcttcatcagtagtggcgactttttcctggtcgagccagatctccgcatacgcgcgggtacgaggcaacagatgctcagaaatcttcttcgcccactcgtacgcttccgcgtgcagctgcgactcgtaagggttcgaggtgcagagtacgttacggttcatgtcgttagctgtcgccagcgcatcaagaccgaccgagtgcagcatctggtgcaccggtttgacgttctttttcagaatgccgtggaactgaaacgtctggcggttggtcaggcgaatgctgccatagatggtgttttcaccggcaaatttgtcgatcgcctgccactgtttagtggtaatcaccccacccggcagacgacagcgaagcagcatcgcgtggcgcggctccagcttctgttcagcacgttcggcgcggatgtcgcggtcatcctgctgatacatgccgtggaagcgaatcagcaggaagttgtcgcccttaaagccgccggtcagaccgtcgtttaaatcttccgcaatggtgccgcgcaggtagttgctttcatgcttcatgcgctcggcgtctgtcagttttccttcgaccactaaaggccctggatgtttttcgctcattagtagacatctcgctgataacggcgctctacgcgcagctcacttaaaaattcatccgccgcttcggtgtccatgccaccaaattcggcaatcacttccagaagtgcctgctcaacgtctttcgccatgcgattagcgtcgccgcagacataaatgtgggcaccatcattgatccagcgccacagctccgcgccctgttcgcgcagtttgtcttgtacgtaaactttttctttttgatcgcgcgaccaggcaagatcgatacgtgtcagcacgccatctttgacgtagcgctgccactccacctggtacaggaagtcttccgtaaagtgcggattaccaaagaacagccagtttttacctggcgcttcgtcggcggcgcgttgctgcataaaggcgcggaacggcgcaataccggtgcctgggccaatcataatcaccggggtttctggattggctggcaggcggaagttatcgttatgttcgataaatacgcggacttcgccctcttcttccacgcggtcagcgaggaagctggaggcaccaccggcacgggcgcggccttccacgtcgtaacgcaccacaccaacggtgacgtgtacttcgttctcgacttccgcctgcgaggaggcgatggaatacagacgcggcgtcagcgggcgcagcagattaattagcgcttcggcatcaagctgtgccggggagaaacgcaccatgtcaacaatcggcgtcgtcgcggcgtaatgctgtaacttcgctttatcgcccaccagcggcagcagtgtttcactgcgggtaagcgtggcgtaattctcaacaatgttggcggtgttgacggtcagttcgaagtgccactgtagcgcttcgttcagaggcaacgttttgccctcgacggtgacaggttcatcgcctttcagccacagcagttcgacaagttctttcaccagtgccggatcgttctgataccagacgcccagcgcgtcacccggctggtaacgcatgcccgagtcacctaagtcaatttcgatatggcgaacgtctttttcagagttacgcccggtaattttctggttaacagagaggctagccaccagcggcgcgtctttgctgtacgggctggtgtggatttcatttaccgcgccagtagcgacggattgcgaaggtgccgcgacaggcgcacgcgatttaagcgcatcaaccacgcgggcgcgccactcgctggcagcagcctggtattcaacatcggcatcgacacggtcgagcaggcgttcaccacccagttccgccagcttgctgtcgaaatctttcccggactggcagaaaaattcataagagctatcgccgaggctaaacacggcaaacgcggtgttttccagctttggcgcttttttggagaacaggaacttatgcagcgcgacggcttcttccggcggttccccttccccttgcgttgacgtcactacgatgagcagtttttcgctggcgatttgtttgaatttatagtcgcccgcgttcaccagcttaacgttcagttttgctgctaataaatcatcacgtaatgcttcagcaacccggcgcgcattgccggtttgcgaggcggagataatagttatacccggcatttctgcggctggcgctggcgtcgctgcaagcgcagcaggctgctgattgagtacgccccagaaatagccagaaacccaggcaagctgggtgggagttaaatcggtcgtggccgcctgaaggcgtgccagttgctccgggttcaacggaagcaacgcggaaggtgggacctgtgtcgtcatgcgtcgttatgttccagtaagcaaagctgtttctgcgccctgtcagcgcccataaaacagaagagaaggtaaggttaacggggcaaacggtgtggattaaagacgggatagcgataactaataaccaaatcgactaacctgttttagcaatagtctttaacaacaaaatagattaaccaacctaatgaaaaacaaatgaatttagccaatcattaagataaatcagcgattttgcgcaacaaagtcgttttagataatgcgaaaaaacagcctttccggtactctacggcggttttatcgtcctgtagagaaattatgatgtccaccacgttatttaaagatttcaccttcgaagccgctcaccgcttaccacacgtcccggaagggcataaatgtggtcgcctgcacgggcattcctttatggtgcgactggaaattaccggggaagtcgatccgcatacgggctggattatcgatttcgctgaactaaaagcggcgtttaaaccaacctacgagcgcctcgatcaccattatctcaatgatattccaggtctggaaaacccaaccagcgaggttttagcaaaatggatttgggatcaggttaaacccgttgtgccgctgttaagtgcggtgatggtaaaagaaacctgcaccgcaggttgtatctatcgcggcgaatgataagagtgtgtcggcggtcaatttcccttaagtaacgctatgttagggtgttgtgttctggatatctggggcatgacatggaagacgactgcgacattattattattggtgccggtattgcaggcaccgcttgcgcgttacgctgcgcgcgagcgggtttatccgttttgttactggaacgcgctgaaatccccggcagcaaaaatctttccggcgggcggttatatacccatgcactcgcggaactcctcccgcaatttcatctgaccgcgcctcttgaacgacgcatcactcacgaaagcctttccctgttaacgcccgatggcgtaacgacgttttccagcttacagcccggcggtgaatcctggagtgtattacgtgcacgattcgatccgtggctggttgccgaagccgaaaaagaaggtgtcgaatgcatccccggagcgacggtggatgcactgtatgaagaaaacggcagagtctgtggcgttatttgtggtgacgatattctccgcgcccgttatgtggtgctggcagaaggtgccaacagcgtcctggctgaacgtcacgggttagtgactcgtcctgctggcgaagcgatggcgttggggatcaaagaagtgctgtcgctggaaacatccgctattgaagaacgttttcatctggagaataacgaaggcgcagcgttgctgttcagcggcaggatctgtgatgacttacccggcggcgcatttctttatactaatcaacaaacgctctcgttagggattgtttgcccgctctcttcccttacgcaaagtcgtgttccggcaagcgagctgctgactcgctttaaagcgcatccggcagtgcgcccgcttatcaaaaacacggaatcactggagtatggtgcgcatctggtgccagaaggtggcttgcacagtatgccggtgcaatacgccggtaacggctggctgctggtgggcgatgcgttgcgcagttgcgtcaataccggaatttccgtgcgcggcatggatatggcgctgactggcgcgcaggcggcggcacaaacgctgataagcgcctgccagcaccgcgagccgcaaaatctgtttccgctttatcatcacaacgtagagcgcagcctgctgtgggatgttctacagcgttatcagcatgttccggcgcttttgcaacgcccgggatggtaccgtacgtggcctgcgttaatgcaggatatttcccgcgatttatgggatcagggtgataaacctgttccaccgctgcgccagttattctggcatcatttacgtcgtcacggcctgtggcatctggcgggcgatgttatcaggagtctgcgatgtctgtagcccgtaatctctggcgcgttgctgatgcgccgcacattgttccggctgactccgttgagcgccagacggcagaacggttgattaacgcctgtccggcaggtcttttttcgctcacaccggaaggtaacttacgtattgactatcgcagttgcctggagtgtggcacctgccgtttgctgtgcgacgaatcaacactacaacagtggcgctatccgccttccggattcggcatcacctaccgctttggataaataataaggataatttatgcccctcttacacctgctccgccagaatccggtgattgctgccgttaaagataatgccagcctgcaactggcaatcgattctgaatgccaatttatttccgtgttgtacggcaatatctgcaccatcagtaatatcgttaaaaagattaagaacgccgggaaatatgcttttattcatgttgatttgctggaaggcgcgtcaaataaagaagtcgttattcagtttttgaaactggtgaccgaggcggacggcattatcagtaccaaagcctcaatgttgaaagcggcaagagcggaaggttttttctgtattcatcgcctgtttattgttgattcaatttcgtttcacaacattgataagcaagttgcgcaatcgaatccggattgtattgagatcctgccaggctgtatgcccaaagtgctgggctgggtgacagagaaaatccgccaaccgctgattgccggtgggctggtgtgcgatgaagaagatgcgcgtaatgcgattaacgcgggtgtcgtggcgctttccaccacgaataccggggtctggacgttagcgaaaaaattactttgacgggataatcgtaaccaattgaatttggtttgatttgtaggccgcacgccacatccgacattcagcgcctgatgcgacgcttgacgcgtcttatcaggcctacaagtccccaggccagaaccgtaggcaggatcatccggcaacacgttattggcaatctgcgtgaatgtttgtcaccagtgcctccagcaccactttccagtcatcaaccacgccaacatctgcctgtgaaaataccgcagcgctggcgtcatgattaatcgccaccacaaacttgctattgcgtacgcccgccattaacgctgctgcgccagaagcgccaacaacaatacacacctcaggtgccagcagatgtccggaaataccaatcactttttcagcatcaacgccaccgttcatcactcgcgcccgactgtagcccacttcggctcccagcttttctgccagcatagcgatttcctggttatctgcctctccgccctgccccaccaccagcacccgtctggcctcagctaatgggtcgcgggtaacatttttcagatcctctgtgctaaccagccagtccggaagcgcacccgggacaatgttcagttgttgcattccagagggcaacgtggcgtttttcgctgctcccgcctgacgcgccagggaaaggcatagcgggcgtttttctgtttgcagcgtcgccgttagcgcatttccccagtgggatttgcgcacgcttacggttggaatatctaacgaagtcacctggcagatgcttgcaccatgtaaacgccaggccagccgggtcgacagttcatcgccaaacgttcccggcggaaagagaacaacgtccgcaggcgttcgctgccactgttccaccaacgcatccagcacctgttccgccactacaggctgaggttcaatctgccagtgcgccagggtacaaccgctgaaatcctgcgccgccagccagcttgctattgcggcattctcctgatttattgtcacaattgcgatattcatggctgcatcctttggcgtaaatagtcctgccatagcttttgagctttttctgctaccgtttgcccatcaatcagcgtcgctccgcgtcgttgctctgctcttgccagttgcagacactgcatcgctggcatttcggcagcaacagttttacggataatttctgctttccccgcagccattcgctggcgcattcccggtactggcaaggccacttcaccgcactgacgcacggcaatcaccgcaggcaagcgaacccggcaacaacgcaacccatgttcagtacgctgttcgagggtgataaacagcgcgtcgagagtgaaacgctccacctgggtgaagcagggccagcccagcatttccgccagcaaaaatggcgtttgcccattctgcccttcgctgctttggcagccggtaattatcagatccagcggattctgatgctgccattcggcaatatggcgagcgacaaattccggcgcaaagcgcagatctgccgccgtctccagcaatacagcttcctcaaacccaagagccatgagatagcgcagccagtgcaatgcccgttcatcccccatgctcaacgcggttaaagacatcggcgtaccgttttttctctgcgccaacagcagcgcggcagcggcctgttcatcagcaccgagtaaacttcgcagtagcgaaatatccggtccgcttttaccctgagccgccgcctgccactctttttccgccagcattccggcatccggttcggctttaaacgctaacagaatgttcattcgcacctcctacatttcccgccgccaccagcgggagggctttagtttctggtgcccatagccaggtcacaacaaaaccaaccaacaacactgtcgccaggagcaataaggtgacttgcattccccactgcgccagcacccacggcagcaggccagtacttaccgccgcgccaagtcgactcatggcagtggcaaaaccgacgcccagcgagcgaatgtcagtaggaaaactttccgcaggcaaaatgcccaccagattactgactgccgaaatggtggtgctgaagagaacaaaaagcagcagcgttaatgaactgccggaaggcaaacaggccatgactaccagcgttgccgccagcagcaaaaaacttcccagcaaaaatttgcgatgtgccagcaggtgcgtcagaactaatcccagcagcgcgcccacaattaacaacgcattaagcatcaggctggcagtcagcgcatcttccagaccaatagtctgggcgatagttggcagccaggtataaatcacaaaccatgggattacgaggcagacaaagaagacgctgttaaacgccgtgcgccgccagtaacgcgaagagaacaaggttttgatgtgtttatgggtcgccgttaccacttcatcgcccagtaaaacatggggaccaaaatagcgatgcacgatagcgtgagcttctgcaaaacgcccctggcgcagtagccagcgtggtgattctggcgttccccagcgtaataacgtaatcaacaacgcgggcagagctgccgatgccagtagccagcgccaggcctccgggttttcggaaataaagtgatgtccggcaatacttgccagcacatagcctacggtccacaccacgctgaatgcgcccagcaaaataccgcgatggcggcgcggggaaaattcagccagcaaggtgtgacctactgaataatcgcctcccagaccaatgccaatcaaaatgcgcagtccaataagatgctctggcgtggtggcaaaaaattgtaaaaacgaagcaagcgtaatcagcaaaaagctgaaggtgaagattttttgccgaccaatatggtcggagatccacccaagaaccaggctgccaaggaacaaaccaaggagcgccgagccgccgatcattcccgccataaacggcgtcagttgcatggcgggcgtaagctgaataatggcgtaaccaatgacgccgagaacataaccgtcggtcaggtgtgcgccgaaagtgagcgcagcaatgcggcagtgaaaacggttaagcggtaaatcatccattcgcaccggtgaagtgttcatctttaccccttcattgtccggtaataagaacggcttctcgcctgagaagccgaaaaggcaacgccccgtcatcgcggaacgctgcctgacacattatttttcaatcggatagatagtacccgtattcataatgccattaggatcgaactgctttttcagcccttccagcaacgcccacgcgctgccgtgttccagtttgctccagtgaacgcgatgtttaccgataccgtggtggtgcaccatcgaaccgccgaggcgaatggtttcttcacagatgatcttgttgagcggattgtggtacttgtcgatttcctcttccggcttacagtcaacgacgttgtaatcgtagacgaagtacatgttggtgccgttctgatagctatgagaggaatgaccgcccagcatggtgatgtcgtcggcgtgcgggaactcagtacgaatacggttaataacgctttcgtagatttcgtggatgcagctccagcagccggatacttcggtggtaaagcccatgttgccggttttgaggatctgcacacgttcggcagccactttatccggtccccagttcaggttgttaaaccaggtttcgatcagcttgctgtccacgcgctggcattgcgggtagcgggcaacgatttccgcaatcccttcgcccgtcaccttcgcaatgcgagggttaccttcagccataaagatcagcacgcattttccgtcggcaaaatgggtgaagtgttgggtgccatcttcagcgtcatacaaacgagcgattgacggacgatacccttccaccatgatttcacgcaggatgttgaagccggttttcatgtcttccaggatatagccgtagaagaggttgttttccggggtgaatttaaagattttcactgttacttcagtgatatagcacaatgcaccttcgttgccgatgatgatgtgacgaatgtccgggccagccgcgcggcgtggcacgtttttaatgcgtgtgacggtgccatcagccaatactgcttccagaccaacgaccatatcttcgattgcgccgtagagtgtggagaactgcccgatacttcgggttgctaccaggccgcccatctgcgccagcggctttgactgcggagaatgccccgtggtgtaacctttttcacgcaacgcgttttccagcacttccagcggaacaccacattgcgccgtcgcctgcatattctcaatatcaatattaatgatttgattcatggcggagccgtcgagcaccaccgagttttctacaacagtttccagcccaccttcggtggcggaagcaccggtacgcggcacaccgttaattttgtgcgcattcataaaattcagcacacgggatacttgctctgtggaaccgagttttacgaccgctgccggaatcggcaaagtataaatgccatgaatatccggaaatttacgaaaacggtcaatactgtttttctttaatactgtttcatcggtaattacgcgatctgcaccaacaatttcctttagctggtcgacaatcgctgcgcgagataaagacatagtaattccttcctgataataaaaatggaataatcattaataagagaaaacagaaaccaccgttatgggttagcgcactaaataaccgccatcaaccactaataaatgcccgttgacataattcgatgccggacttgcgaggaatacggctgcgcccattaaatcctgagtatcgccccaacggtttgccggaatatgatcaagaacgcgctgattggtttctggattactgcgtgtcgccagcgtaatatctgttgcataatagccaggggcgataccatttacctgaatattatattgacctagttcatcacaataagctttggtgaacccggcaagagcatgtttagtggcagaatatgcaggtgaccattgtccacctaagtaagagaacaatgaacagatattaataattttgccgcttttctgcgggatcataatttttgcagcttcatagcttaactcgaatgcggcggtcaggttcacatcaatcatcggatcccagtcggcacgaccgaagtccagcaccttattcagcttacaaataccggcattgttaaccagaatatcaactgtaccgaaacgctcacagcaagcagcgataatcttctgcggcgcgccttctgcggtgatacccacctgcatgaagtccacctcaacaccctgtttttcaatcatttcctttgtttcgccgttatctttgacgaaactaggaataaagatatttgcgccagctttggccaacgccatggcaaatgcctggcctaaaccgctattcccaccggtaacaattgcggttttacctttcagggagaaaaaatccattgagaacgcattgagagattcgattgacatagttagctccaatttccgtaaggcaaaaaaaaagaaaggtaacttcccccgcgagagggaagttacctttctcattatctctggtaactggagataatttttagcataagggcataactgctaatgtgatcgtaatcacagtgtgatattcgtattgtcaaataattttaaaaagcagaagcgtgattactctcacacaacacctctgctttccatgttatttattatttcaattactagagacctgagaaaagtaatccacctgaaagggcggcttacttttctcttttttttgtctattacaaatgggaatacgatatgcaacacaactcatatcgccgttggataaccctcgcgataattagttttagcggcggcgttagtttcgacctggcttatttacgttatatttatcaaattcccatggcgaaatttatgggattcagcaataccgagataggtttaataatgagtacctttggtattgcggccattattctttatgcccccagcggcgttattgccgataaattttcacaccgcaaaatgattacttccgcgatgatcattaccggattactgggtctgttaatggcaacgtatccaccgctgtgggtaatgctctgtattcagatcgcctttgcgataacgacgattttaatgctgtggtcggtgtcgattaaagctgcatcgttgcttggcgatcatagcgagcaagggaaaattatgggctggatggaagggctgcgcggcgtcggtgtaatgtcgctggcggtgtttaccatgtgggtcttttctcgctttgcaccggatgacagcaccagcctgaaaacggtcattatcatctatagtgtggtttacatcttgttggggattctgtgctggttttttgttagcgataacaacaacctgcgcagtgccaataacgaagaaaaacagtcattccagcttagcgacatcctggccgttttgcgtatcagcaccacctggtattgcagcatggtgatttttggcgtcttcaccatctacgccattctgagttactccaccaactatctgaccgaaatgtatggcatgtcgctggtggcggcgagctacatggggattgtgatcaacaaaatattccgcgcgctgtgcggcccacttggcggcataatcaccacctacagcaaagtgaaatcccctacccgcgtgatccaaatcctttccgtactcggcctgctgacgttaactgccctgctcgtcacgaactctaacccgcaatcggtcgcgatggggattggcctgattttactgctgggattcacctgttacgcctcacgcgggctgtactgggcctgccctggcgaagcgagaacaccgtcttacattatgggcaccacggtaggtatttgttcggtgattggattcctgccggatgtcttcgtttacccaattatcggccactggcaagacaccctgcccgctgcagaagcctaccgcaatatgtggctgatgggcatggcggcgcttggcatggtgattgtctttacctttttgctgttccaaaaaattcgtactgctgatagcgcccccgcaatggctagcagcaagtaagccaggaaaattacaggagaaaaatcatgtcgaaaaaatacatcatagggattgatggcggaagtcagagcacaaaagtggtgatgtacgatctggaaggtaacgtggtttgcgaaggcaaaggcttattacagccgatgcacacgccagatgccgatactgcagaacatcctgacgacgatttatgggcatcattatgttttgccggtcacgatttgatgagtcagtttgccgggaataaagaagatattgtcggtattggtctgggatccatccgttgctgccgtgcgttattgaaagccgatggcacgcctgctgcgccgttgattagctggcaggatgcacgcgttacacgcccttacgaacacactaaccctgacgtggcatatgtcacctctttttcgggttatctgacgcatcgcttaaccggcgagtttaaagacaatatcgccaactattttggtcagtggccggtggattataagagctgggcatggagcgaagatgctgcggtaatggataagtttaatatcccccgtcatatgctgtttgatgtgcaaatgcctggcaccgtcctcggacatatcacaccacaagccgcactggcgacacatttcccggcaggactgccggttgtttgtaccaccagtgataaaccggtagaagctctgggggccggattactggatgatgaaacggcggtaatttctcttggcacttacatcgcattgatgatgaacggcaaagcactgccgaaagatccagtagcgtactggccgattatgtcttctattccgcaaacattgctgtatgaaggttacggtattcgcaaaggcatgtggacggtgagctggctgcgcgacatgctaggcgagtcgttaattcaggatgccagggcgcaggatctttcaccggaagatttactcaacaaaaaagcttcttgtgtgccgccaggctgtaatggtctgatgacggtgctggactggctgaccaatccgtgggaaccgtacaaacgcgggattatgatcggctttgattccagcatggattacgcatggatatatcgttcgatactggaaagcgtggcgctgacgctgaagaacaattacgacaatatgtgtaatgaaatgaatcactttgcgaagcatgtgatcattactggcggcggttcgaacagcgatctgtttatgcagatttttgccgacgtgttcaaccttccggcacgacgtaacgccattaacggttgtgcaagcctgggggcagcgattaatacagcggtaggtctggggctatacccggattacgcaacggctgtcgataacatggttcgcgtgaaagatatctttataccgattgagagcaatgccaaacgctacgacgcgatgaataaaggcattttcaaagacctaaccaaacatactgatgtgatcctgaaaaaatcgtatgaagtgatgcatggggaattggggaatgtggattcgatccagagctggtcgaatgcgtaagtgaggaaggccgggcgggaaactgcccggcctgaacatacctgaatggttatccccgctgacgcggggaacataagttcgacaacttaaaaaatgataacaagtccggtttatccccgctgatgcagggaacataataaaaactttaactagttcggtttatccctgtttttacaaggaatattaactacactcgatgtctttagaataaaagacaatacgaatcgcactttatcaattttcacttaaagtatgaactggatatctttattcataagaactattcatcaacagcgtatagaggcggttatgtaaaaccactcattagcctcaaaacaaagacaaacttccagatttattacttaaccaatgaataacaagcttaaaaaatatactgttattctaaagaaaaaattaacaggcattaattcaatattaaaaaaataatagattaaaatttcttaacgatttaagaatcatacaaataacactttgattaaatttaattttttgtatcgataattgtgaacctctctggcatggagaactattttgaacatgaggtgttacgtggatatgttgcttattacaagtactgctaatataaaaacttgagaaagagataacgggttatatggtggtttatccccgctggcgcggggaactcgacagaacggcctcagtagtctcgtcaggctccggtttatccccgctggcgcggggaacacctgttttcgcaaatctatggactattgctattcggtttatccccgctggcgcggggaacacgggcgcacggaatacaaagccgtgtatctgctcggtttatccccgctggcgcggggaacactggctctgcaacagcagcacccatgaccacgtcggtttatccccgctggcgcggggaacacgaaatgctggtgagcgttaatgccgcaaacacaggtttatccccgctggcgcggggaacacattacgcctttttgcgattgcccggtttttgccggtttatccccgctggcgcggggaacactctaaacataacctattattaattaatgattttttaagccagtcacaatctaccaactttatagtatcacacaaacaacacatccattatgttaaagagcacttaatccattgattaaaaaggtaaatatttaaaataactctatacaaactaaaatctaccaaactttaccgcaataattttcactccagcgaaaaattaatgccacagaatttgtagagaatgctaatgattagccctggatgggtaaaatggaggagttttcagaggcgacaaacaatataaatgagtagaagtctttacaggttccacccatttataacgcttataaatgtttaatcaggcaatatttagatatttatgtgtttgcatcgacaaacgccaattacgcgcaatgcaggtttcaatgcacaaacgtgtggcatcatccttttggctaatcggctgcagtgcaatgactcgcggtttatcatcggtcagcgttgccagtagttcatccagtgcttcaatatcgcgtacgcgccccactggatgcttgatttcgttggctcgctccagtgcctgtgacaacacttcatagccgccgcgcatgttcagctttggcgatacggtaacccaggtattcggtgtgcagcgtacctcatgagtaccactggtttcgatctggcagctaaaaccgttcttttcgagcagatcagtcagtggcagcaaatcatgaatgcaaggctcaccacccgtaatcaccacatgccgcgcggtgtatccctggcgaccaatgacagccagcaaatcttcactgctcgcagccccccacttatcactctctttggtcttcgccagaatgctgaaaagggagacttcccgatcctcaagcttttcccaggtgtgtttggtgtcgcaccaggcacagccaaccgggcatccctgtaaacgaataaaaatggcgggaacgccggtaaagtaaccctcaccttgcagggtctggaacatctcgttaatcgggtactgcatagcattctctgtgaagtggataattgttaattattgcagatcctgccacaacaatcatgtcttattaacattctgttacaggcaggtttaaagaaaaatgcgaaacatatcgttaataattaaagggagtaacgtattatgtcagaagaaaataaagaaaatggatttaatcatgtcaaaacattcaccaaaattatatttattttttctgtattagtttttaatgataacgaatataaaattaccgatgccgccgtcaatttatttatccagatttaatgagaaatttataatgcgctatttcatactaatgttcactttcgtatgttcctttgttgcagcccaaccaactattgtcccacaattacagcaacaagttacggatcttacgagtagcttaaactcacaagaaaagaaagaactgacgcacaagttagaatctattttcaataatacccaagtgcaaattgccgtattaattgttcccacaaccaaagacgagacaattgaacaatatgctacaagagtttttgacaattggcgtttaggagatgccaaacgtaatgatgggatactgatcgttgttgcctggtcggatcgcactgtccgcatccaggtaggttatgggctggaagaaaaggtaaccgatgctctggctggagatatcatccgtagcaacatgatacccgcatttaaacaacaaaaattagctaagggattagagctagctataaacgctttgaataaccaactcacttcacaacaccaatatccgactaatccttcagaaagtgaatcagcgtcttccagtgatcattattactttgctattttttgggtatttgcagtgatgttcttccctttctggttttttcatcaaggcagtaatttttgtcgcgcatgtaaaagtggagtctgtatttcagcaatctatcttttagatttattcctgttctccgataaaattttttccattgctgtattttccttcttttttactttcaccatatttatggtctttacctgtttatgtgtacttcagaaaagagcatctggtagaagttatcattcagacaacagcggttccgctggaggctcagatagcggcggatttagcggcgggggcggttcttctggaggtggcggcgcatccggccgctggtaactcaaccataaaaaatgccagcccggaggctggcatttttaaatcagataaagtcagtcttatgcctggcctttgatctctttacgaccgttgtacggtgctttttcgcccagagcttcttcgatacgaatcagctggttgtatttagcaacacggtcagaacggctcatagaaccagttttgatctggcctgcagcagtaccaacagccaggtcagcgatggtagcgtcttcagtttcgccagaacggtgagagataactgcagtgtagccagcatctttcgccatcttgattgcagccagagtttcggtcagagaaccgatctggttgaatttgatcaggatggagttagcgatacctttttcgataccttctttcaggatcttggtgttggttacgaacaggtcgtcaccaaccagctggattttgtcgcccagaactttggtctggtatgcgaaaccgtcccagtcagattcgtccagaccgtcttcgatagaaacgatcgggtactgtttggtcagttcttccaggaagtgagtgaattcttcagaggtgaacgctttgttgccttcgccagccagaacgtatttaccatctttgtagaattcagaagctgcgcagtccatcgccaaagtgatgtctttgcccagttcataaccagcagctttaacagcttcagcgataacagccagagcttcagcgttggaacccaggttcggcgcatagccaccttcgtcaccaacagcagtgttcatgcctttcgctttcagaacttttgccaggtgatggaaaacttcagaacccatgcggatggcttctttcacagttttcgcgccaaccggctgaatcatgaattcctggatatcaacgttgttgtcagcgtgctcaccaccgttgatgatgttcatcatcggaaccggcatagagtatttgcccggagtaccgttcagttcagcgatgtgctcgtacagcggcatacctttagcagctgcagcagctttggcgttagccagagatacagccaggattgcgttcgcgccgaatttggatttgttttcggtgccgtccaggtcgatcatgatcttgtcaatgccagcctgatctttagcatctttgccaatcagcgcctgagcgatcgggccgtttaccgcagcaacagctttggttacgcctttacccaggaaacgggatttgtcgccatcgcgcagttccagagcttcacgggaaccagtagaagcacctgacggagcagctgccataccgacgaaaccaccctccagatgtacttcggcttcaacagtcgggttaccacgggagtcgatgatttcacgaccgatgatttttacgattttggacattaggttttcctcaagtcactagttaaactgaaactccagacaaacaacgcgtacccagggtacgcgttgccgctctaacttttttacttacttcgcctgacgtttctggaactcgctggcggctttcacaaagcctgcaaacagcgggtgaccatcacgtggagtagaagtaaactccggatggaactggcaagccacgaaccacgggtgattcggaacttcgatgatctcgaccaactgatcatccccggaacggcccgcaacgcgcagacctgcatcttcaatctgtttcaacagcatgttgttgacttcgtaacggtgacgatgacgctcaacaattgtcggcgcattgtacagctggcgaaccaggctatcgtcaaccaactggcactgctgtgcgccgagacgcatggtaccgccgagatcgctcttctcgctacgaacttcaacgttgccgttttcatcgcgccactcggtaatcagcgccacaaccgggtacttacagtctggcacaaattccgtagagttggcgttctccatgttggcaacatggcgagcgtaatcaattaacgccacctgcatacccaggcaaatgcccagataaggaatattgttctcacgcgcaaaacgcgcggtcgtaatcatgccttctacgccacgatagccgaaaccgccaggtacgaggattgcgtccagacctttaaggatttcaacgccgcgcgtttcaacatcttgtgaatcgatcagtttgatgttgacgctgacacgattcttcagcccaccgtgtttcagtgcttcgatcactgatttataagcatccggcagttcaatgtacttgccgaccataccgatggtgacttcacttaccgggttcgcttcttcgaagataacctgttcccattcggacagattcgcttccgggcagtttaagctgaatcgtttacaaatataatcgtccagcccctgagatttcaacaggcccggaattttatagatggaatcgacgtctttcagagaaataaccgctttttccggaacattacagaacaatgcaatcttcgcacgttcgttcgccggaacagcgcgatctgaacgacaaatcaggatgtcaggctggataccgatggagagcagctcttttacagagtgctgagtcggtttggttttgacttcaccagacgctgccatgtacggcaccagcgtcaggtgcataaacagagtgtgctcacggccaatttcaacagccatctggcgaatcgcttcgaggaacggcaaggattcgatatcacctactgtaccgccgatttctaccagtactacgtcatgaccttcgccaccttccagcacgcgctctttgattgcgttagtgatgtgcggaataacctgcacggttgcgccgaggtagtcaccgcggcgttctttacgcagaacgtcagagtagatacgacccgtggtgaagttgttgcggcggctcattttggtacgaatgaaacgctcgtagtgccccaggtccaggtcggtttcagcgccgtcttcagtaacgaacacttccccgtgttggattgggctcatagtacctggatcgacgttgatgtacggatccagtttcatgatggtcacattgaggccacgggcttcaagaatggctgcgagggaggctgcggcaatgcctttacccagagaggatacgaccccgccggtcacaaaaatatagttcgttgtcatgctgaacctgagaagttaggttgaaaagacgatggaataaccaagacgggaaagcagtatacccgaacatgacctgtgccacaaactttcattatccctcctcttcgccagcgcactattgaaatcaggagtgagaaaatagcccctttggggtaaatgtttttgacgcaaatcaagcgcttgtcatttaaaaaatgacacaaatggcgcttgaccgcgtaattcccttagagatcaatttcctgccgttttacctgttgccagacttcttccattgtttcgaggtcaacacctgtcatttccagtccacgcgcggcaacaatacgctccacttcgcgaaaacgacgctcgaatttttcgttcgctttttgcaatgcgatttctgctttcgtccctaaatggcgagccagattaaccgtggcaaacagcaggtcccccatttcctcctccagtttagcctggtcgacaacagcctgccgcgcttcgtacatcacctcgtcgatctcttcgtagactttatcgactaccggaccaagcgtcgtccaatcgaagccaacgttggcgcaacgtttctggattttttgcgcacgcattaaagccggtaaactacgaggaatatcgtccagcgccgaatgctgcgctttctgcgcgcgctcttcggttttgatttgctcccaacgggcaagcacttcactactgttttcggcagaactatcagcaaaaacatgcggatggcgacgctctaatttatcgctaatagcagcgcaaatatcattaaagtcaaagcgcccttcttcctgagccatttgcgcgtaaaacaccacctggaatagcagatcgcccagttcaccgcgaagatcgtcaaaatcttcacgggcgatggcgtccagcacttcgtaggtttcttcaagggtgtaaggcgcaatggtggcaaatgtctgctctttatcccacgggcagccgttttccggatcgcgcaggcgctgcataatagtgagcaaacggtcgatttgattcattgaattgtcctgaaaattgcgggtctgtcaggtggaaacctgtgaccagaatagaagtgagttagtaacactacccaatcagtacgttaattttggctttaatgagttgtaattcctctggggcaactgttcctttcttcgttgctcctcttgcccgccaggcgatactttttacctgatcagctaacgctacgccatcacgttcctgaccggataaaacaacttcgaacggatatccttttgattgcgttgtacaaggaacacacagacacatacctgttttgttgttgtacatgaaaggactcaggacaacagctggacgatgtccagcttgctcgctaccttttgtcgggtcaaaatcaacccaaatcagatcgcccatatcgggtacgtatcggcttaccattaccagacttccttatctttcggctctccccagtcgatattctcgtggaggttttccggcgtgatgtcgttgaccagttcagcaagcgtaaatacgggctctttacgcactggctcaataattaatttgccatccaccaggtcaatcttcacttcatcatcaatattcagattgagcgcctgcattaacgtagccgggatccgcaccgccggtgaatttccccaacgctttacgctactgtggatcataaccctttcctcaaaccgctatcatatgtagatacagtatatatcaatctacattgtagatacgagcaaatttcggcctaactcccgtgcaaccgacgcgcgtcgataacatccggcacctggttgagtttacccagcacgcgccccagcacttgcaggttgtaaatctcaatggtcatgtcgatggtcgccagttgctgtttggtgtcgctacggctggcaacgccaagcacgttcaccttctcgttggcgagaatggtcgtgatatcacgtaacaacccactacgatcattagctaccacgcggaccaccagcgaatatccggcggagtagctctcaccccataccgcgtcaacaatgcgttctggcgcatgggagcgcagttccgccagttgttcgcaatcggcgcggtgtactgaaataccgcgcccctgggtaatgaagccgacaatctcatctccaggaatcggctggcagcagcgcgcgatgtggtgcatcaggttgccaacaccttcgactaccacgcgaccgttatctttactgcggttttgcggcgtgtagcttttttgctgaagttgcttcagcgcggcggcgtcctgctcttcggcactcggcttattaaattgcgattgcaggaagttcaccatctgattgagacggatatccccgccaccaatcgccgccagcaactcgtcgacatcattgaagttgtaacgcggcagcagatgtttttctgcttctttcaggctgatccccagatgttccagctcgtcgtcaaggatttgccgcccagccagaatgtttttgtcacggtcctgtttacggaaccaggcgtgaattttcgaacgcccacggctggttgtgacgtaaccgaggtttgggtttaaccagtcacggctggggttcggctgtttctgggtgataatttcaatctggtcgcccatctgcagctggtaggtgaacggcacaatgcgcccgccaatttttgccccgatgcagcggtgtccgacatcactgtggatgtggtaagcgaagtccagcggcgttgatcccgcaggcaaatcaacgacatcacctttcggcgtaaagacgtacacccggtcgtcaaagacctgactacgtacttcgtcgagcatttcgccggaatcagccatctcttcctgccacgcaatcagtttacgcagccaggcaatccggtcttcatgtcccgaacgtgcgccgccagcagccgcgccctctttatatttccagtgcgcagcaacacccaactctgcatcttcatgcatctgtttggtgcggatttggatctcaacggtttttccacccggccccagaaccacggtatgaatagactgataaccgtttggtttcgggttagcgacgtaatcgtcaaactcatccggcaggtggcgatagtgagtgtgcactatccccagtgcggcatagcaatcctgtaaacgctcggcgacaatacgtaccgcacgcacatcaaacagctcatcaaaggcgaggttctttttctgcattttacgccagatgctgtagatgtgtttcggacgaccatacacttccgctttaacgccttcagctttcatctcagcgcgcagatgaccaacgaactcttcgatgtagtgttcgcggtcgagacgccgttcatgcagcagtttggcaattcgtttgtattcggttggatggaggtaacggaagcagtaatcttccagttcccatttcagttgtccgattccgagacggttagccagcggtgcgtagatgttggtacactcttttgccgccagtacacgttcatcttccggcgcatcttttacttcgcgcagatgagcaatacgctccgccagtttgatgactacgcagcgaaaatcatcgaccatcgccaataacatccggcgaacgttatcgacctgttcggaggaaacagaatcagtgtgcgtcgctttcagctggcggatcgccgccatatcacgcacgccgtgaataaggttaacgaccgacttaccgacgctctcacgcagcacatcttcgctgactacgttggcatccgccagagggaaaagcagcgccgcccgcagcgtgtcaatgtccatacttaatgtcgagaggatctccaccatctcaacaccacgccacaataacagactggcatccggatgcccctgcgtctgttgcagacaatacgcccaggtttcggctaagcactcacacgacttctggctggtaatacccagacttgcgatccatttttccggatcaaattcaccagccttattgatatgtgcacttcttaccgcaaccatcgtcctctcctttagggaccagacctgccgaaatcggcaaatcgcaactatttaacgcgcgagaaaagtaccatcgattccagatgtcccgtgtgtgggaacatatccagcatcgccagtcgcgcaatggtatatcctgcttttaataacgcttcgctatcccgagccagcgttgcagggttacaggatacataaactatacgaataggttccagttttataatttgctgcataacacctgcggcacctgctcgcgccgggtccagcaacactttatcgaagccgtttttcgcccacggctgctttgtgacatcttcttcaagattttcgtgataaaacgtcacattctgtaagccattaagacgcgcattctgctggcctttttccaccagcgccggaacaccttctacaccgaccacactggcagcttgtgtcgccaatggcagtgtaaagttgcccataccgcagaacagatccagtacgcgatcttcaggttgcacatccagccattccaacgcacgcgctaccattttttggttcacacccgcattgacctgaataaaatcgcgcgggctaaaagttaagcgcaacccgtttgagtcataccagggcatctcaccagagacggtttcgagtatctcactatcgggggcgagatacagatccaggccttcagaatgcgaaaagcgttccagtttttcgcgatctgccgaacttagcggtgcggtatggcgcaaaatcatcagcgtgccgctggttgcctgtaccagttcaacatgaccaagatggcgcatagcttgtaagctgcccagacatgccctgactttgggcagcaatgcttcaagttggggcgctaaaatggggcattgtttgacgtcgacaatgtcactggagcccgctttgcgaaaccccatctgaagttgctgtgttttcggtaagtagttcagacttaaacgcgcgcgacggcgatagccccagggaacatcggcgatcacttcagagacatcgtgtttcattaatcgggcgagtgccgcacttttgcttcgctgctgtaaatccacgctggcgtgttgttgctgacagccaccgcatacgccaaaatgaggacagcgtggcgtttcgcgttccgggctatcgcttaaccggcgtacgactttagcgcgggcatactgttttttatcttcagtaacagtaacttccgcgttttcctgcggcaataatccggggataaatagcgttttgccgttatgtcgcgccacgccctgaccaaaagagtcgaggtcgttgactgaaacggttatgatctgacgcgtcgtcgtgcgtcgttttgcagagtagaattgcgccattggcgagactttctcaatttaacagtgtgaccttaattgtcccataacggaactccatgaccaactacagcctgcgcgcacgcatgatgattctgatcctggcaccgaccgtccttattggtttattgctgagtatctttttcgtcgtgcatcgctataacgacttgcagcgtcaactggaagatgccggtgccagcattattgagccgcttgcagtttctactgaatatggcatgagcctgcaaaatcgcgaatctatcggtcagttaataagcgtactgcatcgtcgccattccgatattgttcgcgcgatttcggtttatgatgaaaataaccgactctttgtcacctccaattttcatcttgatccctcatcaatgcagctcggcagcaacgtgccgtttcctcgccagctcactgtcactcgtgacggcgatattatgatcctccgcacgccgattatttctgagagttactcccccgacgaatcgcccagtagcgatgccaaaaatagtcaaaatatgttgggatatattgcgctggagctggatcttaaatcggttcgcttgcagcaatataaagagatctttatttccagcgtgatgatgctgttttgtatcggtattgcgcttatttttggctggcgcttaatgcgcgatgtaaccggtccgattcgcaacatggtgaataccgtcgaccgcatccgtcgcgggcaactcgacagccgggtggaaggatttatgctcggcgagctggatatgctgaaaaacggtatcaactcgatggcaatgtcgctggctgcttatcacgaagagatgcagcacaatatcgaccaggcgacgtccgatctgcgtgaaacgctggagcagatggaaattcagaacgttgagttagatctggcgaaaaagcgcgcccaggaagcggcgcgtattaaatccgagtttctggcaaatatgtcacacgagctgcgtacaccactgaatggtgttattggctttacccgcctgacgctgaaaacagaattaacaccaacgcagcgcgatcacctgaatacgattgaacgttcggcaaataatttgctggcaattattaatgatgttctcgacttctcgaaactggaagcaggtaagctgattctggaaagtattccattcccactacgcagcacgctggatgaagtcgttactctgctggcacattcttctcacgataaagggttagaactgacgctcaatattaaaagcgacgtgcctgataacgtgatcggcgacccgctgcgattacagcaaatcatcactaacctggtggggaatgcaattaaattcaccgagaatggcaacattgatattctggtagaaaaacgtgcgctgagtaataccaaagtgcagattgaagtgcagattcgggataccggcattggtattcctgaacgcgatcaatcgcgcttattccaggccttccgacaggctgatgccagtatttcccgccgtcatggtggcaccgggctggggctggtgattacacaaaaactggttaatgaaatgggcggcgatatttcgttccatagccagccgaatcgcggttcaactttctggttccacattaatctcgatctgaacccgaacattattatcgaagggccatccacccagtgcctcgcaggtaagcgcctggcctatgtcgaaccaaactccgcagcagcgcaatgcacgctggatattttaagtgaaacgccgctggaagtggtttatagcccaacgttctccgcgctgcctcccgcgcattacgacatgatgttgttaggcatcgcggtgaccttccgcgagccgctaacaatgcaacatgagcgattagcgaaagcggtatcgatgaccgatttcctgatgctggcacttccttgccatgcacaagtcaatgctgaaaaactcaagcaagatggtatcggcgcgtgtctgctgaaaccattaacacctacacgcctgttgcctgccctgacggaattttgtcatcacaaacaaaacacgcttttgcctgtaaccgatgaaagtaagctggcaatgacagtcatggcggttgatgacaaccccgctaacctgaaacttatcggcgcattgctggaagatatggtgcaacatgtggaactttgcgatagcgggcatcaggcggttgaacgggcgaaacagatgccgttcgatttgatcttaatggatattcaaatgccggacatggatggcattcgggcctgcgaactcatccaccaactcccgcatcagcaacaaacgccggttatcgcggtaacggcgcatgcaatggccgggcaaaaagagaagctgcttggcgcagggatgagcgattatctggcgaaaccgattgaagaagagcgattgcataatttgttgttgcgctacaagcctggcagcggtatttcctctcgcgtcgtgacgcccgaagtcaacgaaattgtggtgaacccgaatgcgaccctcgactggcaactggcactacgccaggcagcaggaaaaaccgatttagcgcgcgatatgctgcaaatgttactcgatttcctgcctgaagttcgcaacaaagttgaggaacagctggttggagaaaacccggaaggcctggttgatttgattcataaactgcatggcagttgcggctatagcggtgtgccacgtatgaagaatctctgccaactgatcgaacaacagctacgtagcggtactaaagaagaagatttggaaccggagctgctggaactgttggacgagatggataatgtcgcgcgcgaagccagcaaaattctcgggtaatggatgtcttgtcgagtagcaatcggctttttatgacgctggtttcagattggtgacaaagtgcctgtgtttatgccggatgcggcgttaacgccttatccggcctacaaaaccaattaaattcaatgaattaaaaaatgatgtagacctgatacatagcacaacaggctattttgcgtttagcatcagtctcaaaccggctccagatagagccggttttggttttctgtcttaacgcaccatgcacgggcgcttgttatcgaacgtccagccaggaatcagatactgcattcccatcgcatcgtcacgcgcgccaagcccgtgtttctgatacagctcatgggctttcatcacttgatccatatcgatttctacacccagccccggtttttctggcacctgtaccagcccgcctttgatctcaaacggttctttggtcaggcgctgattgccttcctgccaaatccagtgcgtatcaatagcagtaattttacccggtgcagcggcggcaacatgggtaaacatcgccagggaaatatcgaagtggttgttagagtgtgaaccccaggtcaggccaaattcatggcacatttgcgccacacgtaccgaaccttgcattgtccagaaatgcggatccgccagcgggatatcaacggattgcagggagagcgtatggcccatttgccgccagtcggtggcgatcatattggttgcagtcggtagacctgtcgcgcgacggaactctgccatcacttcacgcccggagaaaccttgctccgcaccacacggatcttctgcataagccagcgaacctttcaggtatttaccgattttaatcgcttcgttcagcgaccaggcaccgttaggatcgagcgtaatacgcgcctgcgggaagcgttgcgccagtgccacaatagactcggcctcttcttccccggccagtacaccgcccttcagtttgaaatcgttgaagccatatttttcatatgccgcttccgccaggcgcaccaccgcatccggcgtcatcgcttcttcatgacgcaggcgataccagtcgcatgagtcatccggctggctttgatacggcagcggcgtggctttgcgattaccgacgaagaacagataaccgagcatttcgacttcgctacgctgttgaccatcgcccagcagcgatgccacgtttacccccagatgctgccccagcagatccagcattgccgcttctatcccggtaactacatgaatagtggtacgtaggtcaaatgtctgcaaaccgcgcccaccagcatcacgatcggcaaaagtattacgcaccagcgtcagaacgtttttgtattcacccagcgttttacctaccaccagcggaatcgcatcttccagcgttttacggattttctcgccgccgggaatttcccctacgccagtgtgaccagaattatctttgataatcacaatattacgcgtaaagaacggtgcgtgtgcaccactcagattcatcagcatactgtcatgacccgccaccgggataacctgcatttcagtaacaacaggcgtcgtaaattgagaactcatatttatgtcctttttcagaatcaatgacggccgaaaacgggacgtttacggtcaaaggtccagccggggatcaggtactgcatcggacctgcgtcgttacgcgcaccgccaggcagacgtttataggcctcatgtgccttttgtacctgttcccagtccagttccacgcccagaccgggcgcatcaggaacggcaatttttccgtttttaatctccagcggattttgggtcaggcgacaatcgccctcctgccaaatccagtgggtatcgatagcggtaggattacccggtgccgccgcgcccacatgggtaaacatcgccagagagatatcgaaatggttattagaatggcagccccaggtcagcccccagtcgtcgcaaagctgcgccacacggactgcaccggaaagcgtccagaagtgcggatcggcaagtggaatatctaccgcattgagcatcaccgcatgacccatttcgcgccagttggtggcgatcatgttagtcgcgacgggcaagccggtcgcccgtcgaaattccgccatcacttcacgtccggagaagccctgttctgcgccgcatggatcttcggcataggtaagaacatcattcagccctttgcataaagaaatggcttcatcaagcagccatgcaccgttgggatcaacggtaatccgcgcatccgggaagcgtttcttcaatgcacgaacagtgtcgatttcttgctcgccaggtaacacgccgcccttaagtttgaaatctttaaagccgtagcgatcctgtgaggcttccgccagacgcacaacggcttcgctgttcattgctttctgatgccgcaactgataccactcatggttgcccggcgtattttccacataaggaagatcggttttggtccgatcaccgatataaaacagataaccgaggacggtaatagcctcgcgttgcttgcctggccctaacagttcgcagaccggaacattcagcgccttacctagcaggtcaagcaaagcggcttccagcgccgccacggcgttaacgcgtaattcaaaggtccaggcacctttaccgaaggtatcaaaatcggcggcctgattacctttatgcacctgctggaccactttattcagtcgcgcaacttcctggcccagaaccatcggaatagcatcgacaagcgtctgataaatcacatctccgcccggcgcttcaccaatgccggtatgcccggcgttatcggtgagtaccacaatattgcgggtgaaatatgcgttatgtgccccaccaatattaagcaacatgctgtcatgcccggccaccggaatgactttcatatcagtaataacaggactggattgtgtcgccatcttattgccccgcaacaggtttcaactcgatacgcttgatatcgcccaccagcaccaggtagctcagtaccgcgattaaggcatgaacaccaacataaatcagcgccccattaaacgagccagtcgtgccaacgatataaccaattgcgattggcgtgacgatgccagaaatgttaccgaacatgttgaacaggccaccggaaagaccgctgatctcttttggcgcggtatctgccattactgcccaacccagcgccccgatgcccttaccgaagaaggccagcgccataaagccgatgatcatccactcaacgttgacgtagttgcagaacaccatcaccatcgacagcaacatgcccattacgatcggtgttttacgcgcaatgttcagcgatcccgtgcggcgcatcagccagtcggaaataatcccacccagcacaccgccgataaaaccgcaaaccgccggaacggaagccacaaagcccgctttcagaatcgacatcccgcgtgcctgcaccagataaaccgggaaccaggtaataaagaagtaagtcagggcgttgatacagtactgaccgatataaacgccgatcatcatccgtgaccctagcagctgtttgatctgcccccacttcacgctgaacggcactttaactttggtgttttgctgatccatattgatcagcgcaccacccgcggcgatgtactccagctctttcttatttacccccggatgttgatttggctcgtggatgactttcaaccagataaagctgatgacaatccccagaccgcccataaagaagaagacgtgtgaccagcccacttcatgcgtcagccagcccataatcggcgcgaagatcaccgttgcgaagtattgagcggagttaaaaatcgacaccgccgttcccctttcctgcgccggaaaccaggccgcaacaatgcgactgttgccggggaaagatggcgcttcagcaagcccgaccaggaagcgcagcgtaaacagggcaacgataatgccgaatccactaaagatatcgacgaagccttgcagcaaggtaaacatcgaccagataaagatcgaccagaagtagacgcgttttgaaccaaaacggtccagcaaccagccaccagggatctgcccgataacataagcccatgagaaagcagagaacacatagcccattcccacgggatcaaggccgatatctttggccatttccgaaccggcgatagagagcgtagcgcggtcgccgtagttgaaggatgtgacgataaacaacatcaccactatccagtaacgagcatttgtgcgtttttccacactgctcgcagcctgacttaaagaactcattgttgcactcctgaaaattcgcgttagccacgctcactctggactgcgacatcgccaggaaatcagaggtgacgtagggtgttttttgccgtttttataggtcgttcgccgaatacggcgcgtgtttatatctggcaatagcagtataaaaagcgcgccatagcggctcaccgtgcaacaacacaacattaatgcgttcaatgaggcccgattttggcattagccctggacggtggaatccacttcacggaaatgaaaacaagaacaagaaaggaagggttaaaacgaagaaataaagaagagtatgaaatggatcgcttgactccaggcaaacgccagtaaaaatccgcgctatgaagcagtttttactggcatttgcctgaaaagattcgattcagcaccgctaaaacgacatttaccgctcgctgaacatatcaggacaacagcgtgccccactgttcgacccacggatttgattccgtttccggttccgggttctcactggcgtcaatcaacagcatttcgccaacccgctgagcgctctgttcctgcaacaaggcatcgaactgtttgccgccattgcagaaattcacataactactgtcgccgagcgcaatcacgccataacgcagattcggctggaagcccagactatctttgattccctgaaagagtggcacaatgctatcaggaaggtcgccctgcccggtcgtggacgtaaccaccagaacatacttatcctgatagggcagccagtcgcttaattcaggatcttcaaataccgttgctttgtggccctgcgcggtcagaatcgcttccgcttcttcggccactaacagtgaattcccgtacatggtgccgacaaaaataccaatttccgccataccgttttctccctggattaggaacttatctctccatcctgacccgatggcgcactgaactcaaccctttcattttcaggaagcagaccgcgccagccaaattgtgataacgcctgcatccaggtgtcgtccaggcccgcgtgaatagtcagcggctcgccagtaaaaggatgcgtcaatgacaactgactggcatgtagcattaaccgctggaggccaaaatgctcagcaccgctgcgattctggcgtaaatcgccatgtttgctatcgccaataatcggatgacgcaaatgggcaagatgtcggcgaagctgatgtttgcgtccggttttcggctccagttccaccaggccgtagcgcgtggtcgggtaacgtccggtcgctaccggcatttctacggtcgccagaccgcgataatgcgtcactgctggctgcgggcctttatcttcgcgggcaaatttatcagcgattttgtccagttcttccaccagtggataatccagcaccgcttcttccatcaaccagccgcgcacaatcgcatggtaacgtttctggatttggtgctgttcaaactgttgtgccagcagccgtccggcctcgctggataatcccatcaacaacacaccagaagtgggtcggtccagacgatgagcagtaaaaacatgctggcctatctggtcacgcacggtttgcatgaccactactttctcgtcgcgatccagccagctgcggtgaaccagccagccggagggtttatttaccgcaaccagccattcatcctgatagagtatttccagcattagctcgcatcatccgcaaaaagagcatccagtttttccagctcagccagaataagcgcgcgttgcggatggtccgtcgccagcgccatttcataatagggtgcaacggcaaaagcgcccggtaacggctgtttgttatctaacaaatcgtgcattcgcgggatcagcacccactgcaaccactccagtggttccatggtgtccataaagaacggttgggtactattaaattgatgcggctggggttcatcgtttcgccagtgctgatgttcacgcagtaacgcttcaagcgcctgcaactggagacgaacgcggtcatgagtggtcataaagcaacctcaataagaaaaactgccgcgaaggatagcaggaataaaaaaagggagcactgtattcacagcgctcccggttcgtttcgcagcattccagctacttttgttgctccctgctcatccttgacaacttttcctctggccttgcggccaatcgttcatcctgaactattgcttcctgctcacaccaccccgatgtgatacttcatcctgaagtgtccctggccttcctgacccaccgaatcatcctgaccggttctcattctccatcctggaggtgtcctttaacgcgtcctgcgtcatcctcttcgcttcatccagaagcctttccctgaaacaccatcctggtgtgtcctgcagaagtgtcatcatcctgatgttcacttcgttgtctgactccctgtcgacgaagatagaatcgtctttttcgcgaagtcttacaaggcgcttacagacaatgccttaaggaaaatttcatatgaaagttaagaattaacaatcaacattttgattttaaatgaaaataacgattcttatctttttaagtattcgcttatttcctggcgatctcctacagagtctgtaagagatctctcacaaccagatggggtatttggattacagaagaggcttaagttgattaaggaattccgcaagatttgaggctaaatgcgtccgtttacgtgttcccagcgtctctttgcacacttcaccggagagattacacaccgagatgacctctaactcttcttccagcgtcgcgataaatagtgtgggcggcagttttagccttttctgagtcaccagatgaccaatcagattttcctgcacccgacggaagtcgtcttcactccaggtttgcagcaatgtcagtttgatatcgccaaactgcgcgtgcatatccccggcaaactgagtcgtataaaaggtatgaattgtgggttgtatcacaatatcaaaagcgcgttcaaccgcgtttacattttgttccccggtaaacggctggggttgccagtatacggcatcttcggtagttgaaataatgcacggtgaaggaacaccgtacagttcctcacttaacggccagcttttatgctcttcatgccacgcatcgcagtagcgtgcagtaaaatctttcagggcttgtgcggtcaaatcgtccactaatttctctcttcacttaaaccagatacacttgtcgtttagtttatctggtttatgacggtgaaacatgtcttcttatgcaaaccatcaggcacttgcgggcctgactcttggaaaatcaaccgattaccgggatacctatgacgccagcctactgcaaggcgttccacgcagcctgaatcgcgacccgctgggtctgaaagcggataacctgccttttcacggtacggatatctggacgctgtatgaactttcctggctgaatgcgaaaggtttgccgcaggtcgctgtcggtcatgttgaacttgattacaccagcgtaaatctgattgagtcgaagagttttaagctctatctcaacagttttaaccagacgcgttttaataactgggatgaggtgcgccagacgctggagcgcgacttaagcacttgcgctcagggtaagattagcgtggcgttatatcgtcttgatgaactggaaggccagccgataggtcattttaatggcacttgcattgatgaccaggatatcactatcgataactatgaattcactactgactatctggagaatgccacctgtggtgaaaaagtagtggaagagacgcttgtcagccacctgctgaaatcaaactgcctgatcacccatcaaccagattggggttcgctccaaattcagtatcgtggacgccaaattgacagagaaaaactgctgcgttacctggtctcattccgtcatcacaacgagttccacgaacagtgcgtggaacgcatctttaatgacctgttacgcttctgccagccagaaaaattgagcgtttacgcacgttatacccgtcgtggcggtctggacattaacccgtggcgcagtaatagcgattttgtcccatcgaccacaagactggttcggcaataaattttttctcaattttgcgtgctggattcacgcagaaggttgtgaaaggtcatcaggcagggctattgtaatcaaagggaatgacgatattcgtcccataaggagtttttcttgattacacatattagcccgcttggctccatggatatgttgtcgcagctggaagtggatatgcttaaacgcaccgccagcagcgacctctatcaactgtttcgcaactgttcacttgccgtactgaactccggtagtttgaccgataacagcaaagaattgctgtctcgttttgaaaatttcgatattaacgtcttgcgccgtgaacgcggcgtaaagctggaactgattaatcccccggaagaggcttttgtcgatgggcgaattattcgcgctttgcaggccaacttgttcgcggtcctgcgtgacattctcttcgtttacgggcaaatccataacaccgttcgttttcccaacctgaatctcgacaactccgtccacatcactaacctggtcttttccatcttgcgtaacgctcgcgcgctgcatgtgggtgaagcgccaaatatggtggtctgctggggcggtcactcaattaacgaaaacgagtatttgtatgcccgtcgcgtcggaaaccagctgggcctgcgtgagctgaatatctgcaccggctgtggtccgggagcgatggaagcgccgatgaaaggtgctgcggtcggacacgcgcagcagcgttacaaagacagtcgttttattggtatgacagagccgtcgattatcgccgctgaaccgcctaacccgctggtcaacgaattgatcatcatgccagatatcgaaaaacgtctggaagcgtttgtccgtatcgctcacggtatcattatcttccctggcggtgtgggtacggcagaagagttgctctatttgctgggaattttaatgaacccggccaacaaagatcaggttttaccattgatcctcaccggcccgaaagagagcgccgactacttccgcgtactggacgagtttgtcgtgcatacgctgggtgaaaacgcgcgccgccattaccgcatcatcattgatgacgccgctgaagtcgctcgtcagatgaaaaaatcgatgccgctggtgaaagaaaatcgccgtgatacaggcgatgcctacagctttaactggtcaatgcgcattgcgccagatttgcaaatgccgtttgagccgtctcacgagaatatggctaatctgaagctttacccggatcaacctgttgaagtgctggctgccgacctgcgccgtgcgttctccggtattgtggcgggtaacgtaaaagaagtcggtattcgcgccattgaagagtttggtccttacaaaatcaacggcgataaagagattatgcgtcgtatggacgacctgctacagggttttgttgcccagcatcgtatgaagttgccaggctcagcctacatcccttgctacgaaatctgcacgtaatctccgctcccccggtgacgtttgttgccgggttttctcgtttttggtcacttactcatcaactcatttcatttgttatatgaatgtttcttaccaccctcacgcgacaaatatcatcacagttaatatgtcatacaatttatgttgcaacgcaaacgtttccctattttcataaaccgtattttatcgctatgaaaaagaaattatcgccatgattaactaaaagtattgattttttcagttcaacctacatatattgcgcgccccggaagaagtcagatgtcgtttaatgggcaaatattgcccttaaattctcttttacttttgatttacagagtaaagcgttgggataatctatcttccaagtagattattgtatttgagatcaagatcactgatagatacataacttgtgtgtatctttccgccctcaaattattacggcggtaaatgattaagccatcgccgatagacagatttcatttttacggtcaggcaccttcccgggctgaactggctaaaagctgaattatttgcattcctccaggagaaatagatggaaacgactcaaaccagcacgattgcgtcgaaagactctcgtagtgcctggcgcaagacagacaccatgtggatgctgggcctttacggcacggcaatcggcgcgggcgtgctgttcctgccaatcaacgccggtgttggcggtatgatcccgctgatcatcatggctatccttgcgttcccgatgacgttttttgctcaccgcggcctgactcgcttcgtactgtctggtaaaaacccgggcgaagacatcaccgaggttgtagaagaacactttggtattggcgcaggtaaactgattaccctgctctacttcttcgctatctacccgatcctgctggtttatagcgtggcaatcaccaataccgttgaaagcttcatgtctcaccagctgggtatgacgccaccgccgcgtgcgattctgtcgctgatcctgatcgtgggtatgatgaccatcgttcgcttcggtgagcagatgatcgttaaagcgatgagtattctggtattcccgtttgttggcgtactgatgctgctggctctgtacctgatcccgcagtggaacggcgctgcactggaaacgctgtctctggacactgcatctgcaaccggaaacggtctgtggatgaccctgtggctggcaattccggtaatggtgttctcgttcaaccactctccgatcatctcttctttcgccgttgcgaagcgtgaagagtacggcgatatggcagaacagaaatgctcgaagatcctggcattcgcacacatcatgatggtgctgaccgtaatgttcttcgtcttcagctgtgtactgagcctgactccggcagacctggctgcggctaaagagcagaacatctcgattctgtcttacctggctaaccactttaacgcaccggttatcgcgtggatggctccgattatcgcgattatcgctatcaccaaatccttcctcggtcactacctgggcgcacgtgaaggcttcaacggtatggtgattaaatctctgcgtggtaaaggtaagtctatcgaaatcaacaagctgaaccgtatcactgcgctgttcatgctggtaacgacctggattgttgccaccctgaacccgagcatcctgggtatgattgaaaccctgggcggtccaatcatcgcgatgatcctgttcctgatgccgatgtacgcaattcagaaagtaccggcaatgcgtaagtacagcggtcacatcagcaacgtattcgttgtcgtgatgggtctgattgcaatctccgcaatcttctactctctgttcagctaagtcctttcgcgccgctttcgggcggcgcttcctccgttttaacgcgatgtatttcctatgattagcgtattcgatattttcaaaatcggcattggcccttccagttctcataccgttggaccaatgaaagcgggtaaacaatttaccgacgatctgattgcccgtaacctgcttaaagacgtgacccgcgtggtggttgacgtgtacggctcgctctctctgaccggtaaaggccaccacactgatatcgccattattatgggcctggcgggtaacctgccggataccgtggatatcgattccatccccagttttattcaggatgtgaatactcatggtcgcctgatgctggcaaacggtcagcatgaagtggagttcccggttgatcagtgcatgaacttccacgccgacaacctttctctgcatgaaaacggtatgcgcattaccgcgctggcgggcgataaagtcgtttacagccagacttactactctattggcggtggctttatcgttgatgaagagcattttggccagcaggatagcgcaccggttgaagttccttatccgtacagttcagcagccgatctgcaaaaacattgtcaggaaaccgggctgtcactctctggcctgatgatgaaaaacgagctggcgctgcacagcaaagaagagctggaacagcacctggcgaacgtctgggaagtcatgcgcggcggtattgagcgcggtatttccaccgaaggcgtgttgcctggcaaactgcgcgttccacgccgtgctgcggcactacgccggatgctggtcagccaggataaaaccaccactgacccgatggcggttgttgactggatcaacatgtttgcactggcagtgaacgaagagaacgctgctggcggtcgcgtggtgactgcgccgactaacggtgcgtgcgggattatcccggcagttctggcgtactacgacaagtttatccgcgaagtgaacgctaactcactggctcgttacctgctggtagccagcgccattggttctctttataagatgaacgcgtcgatttctggtgctgaagtgggttgccagggtgaagttggcgtggcgtgctcaatggcggcggctggtctggcagaactattaggcgcaagcccggcgcaggtgtgcatcgcggcggaaatcgccatggagcacaacctcggtctgacgtgtgacccggtcgccggacaggtacaggtgccatgcatcgagcgtaacgccattgcggcagtaaaagcggtgaacgccgcacgtatggcgctgcgccgtaccagcgagccgcgcgtctgcctcgataaagttatcgaaaccatgtacgaaacaggtaaagatatgaacgccaagtaccgcgaaacctctcgcggcggcctggcaatgaagatcgttgcctgcgattaatcgctctccaaaggcctcgttttgcgaggcctcttcccgatttctcatccagccgtagcctgttccggcatcgaatgttacccttatcgcctgatctttaagggggttatcgtggctgttcatttgcttattgtcgatgcactgaatcttattcgtcgcattcatgccgttcaggggtcgccctgtgtcgaaacctgccagcatgcgctcgatcagctcattatgcacagccagccaacccacgcggtcgccgtttttgatgatgaaaaccgcagtagcggctggcgtcatcagcgtttaccagattacaaagcgggtcgaccgccaatgccggaagagttgcacgacgagatgcctgcattacgcgccgcctttgagcaacgcggcgtcccgtgctggtcaaccagcggcaacgaagccgatgacttagccgccacgctggcggtcaaagtgacacaggccgggcatcaggcaacgattgtttcgacagataaaggctactgtcagttactttcaccgacattacgtattcgtgattacttccagaaacgttggctggatgcgccatttatcgataaagaatttggcgttcaaccgcagcagttgcccgattactggggacttgcggggatcagcagttcaaaggtaccgggtgttgcgggaatcggaccaaaaagcgccacgcagctgctggtcgagtttcagagtctggaagggatatatgagaatctggatgcggttgccgaaaagtggcgcaaaaaattagaaacccataaagagatggcgtttctgtgccgcgatattgcccgcttacaaaccgatttgcatatcgacggcaatttacagcaattgcggttggtacggtaacggcgagccggatacgccgcaaacgtcgtatccggcattatcacatcagcgcatttaccaggcggtatggtaaagctctacaatatcctcaagcgttgcttcacgcgggttgccaccggtacaaacatcatccagtgccgcctgcgccagtgccggaatgtcttccttgcgtacaccaacatcacgcaaatgtggcggaataccgacatcacggttgagagcaaacaccgcttcaacagcggcattacgcgcctcttccaggctcataccttccactttcacgcccataacgcgcgcgatatcgcggtacttctcaccggtaaagtcagcgttataacgcatgacatgcggtaacaggatggcgttcgcaacaccgtgtggagtgttataaaacgcgcccagtggatgcgccataccatgcaccaaccctaacccaacattcgagaagcccatacccgcaacatactgcccgagcgccatttcttctccggcatccttatcaccagcaaccgatcctcgcagcgccccagcaatgatttcaatcgctttaatgtgcagtgcatcggttagcgcccacgcgccacgggtaatatacccctcaatagcatgagtgagcgcatcgacacccgtcgcagctttcagcgctggaggcataccatccatcatgtcagcgtcaataaacgccacctgcgggatatcatgcggatcaacgcaaacaaacttgcgccgtttctcttcgtcagtgatcacgtagttaatggtcacttctgccgcagtacctgctgtggtaggaattgccagaatcggtacactgggtttattggtcggggaaagcccttccaggctacgcacatcggcaaactccgggttgttgctgataatgccaatcgctttacaagtatcctgtggagaaccaccaccaatagcgatcaggtaatccgcgccgctattctggaatacaccgagcccttctttgacgacagtaattgttgggttgggcactacgccgtcgtaaatcgcccatgccagccctgcagcatccatcttatcggtcactttcgccaccacgccgcattgcaccagcgttttatcggtgacgatcagcgccttctgataaccacggcgtttcacctcatcggttaaagccccaacagcaccccgaccaaaccatgccgtttcgttcagaatcattctgttagccatcatccttctccttgttgctttacgaaattactcttcaattcgtaacccataggttttgaatttctccagcactacggcaatctcttcatcgctcagcactggcaccgggtccgtaatcgccagggtcgtcaggtaaagttgcgccagcacttcaacttcatgcgccagccataacgctttttccagattcacctcacaagcgataagcccatgatgttgtaacaaagttgccttacgatttttgagagccagcgcaacatgttcagaaagttcgcgtgttccaaaggtcgcataaggcgcgcaaggaatagaattaccgccagccgccgcaatcatgtagtgaatagcggggatcgatcggttaagaatggaaactgccgtgcaatgaacggcatgattgtgaacaaccgcgttggcatccggtctgctttgataggctgccatatggaaacgccattcgcttgaggggagctttccttcctcatgtttaccgttgccatcaataaagacaatatgcgactccgtcagtttttcatatggaatgcctgtaggcgtaatcagcatcccatcctgataacgtacactgacgttccccgctgtcccctggttcagtcccaggcgggtcatttccaggcaagtgtcaataatctgacgagcaagtttatttcgttccattagctacctctctctgattcaaaacagggcaataatgttgttcctttcacactattgaattagccgtttaattacccaccatcttcttcctgattaacaagaaagaaattcacaagcttatattttgtgacctggttcaactaatcacagtaaataactgcaagttctctttttataaccccattaaaaatgaccgctcttaaaaatatttatcaaaacggtcatttttctattcctccaagcccggaatgaccgttttcggcacaaacaattaatacggtcatctgatttgtgttttttatgatttattttctgaaacgggcatgaaatttcgattattaaagtgatggtagtcacataaagtcaccttctagctaataagtgtgaccgccgtcatattacagagcgttttttatttgaaaatgaatccatgagttcatttcagacaggcaaatattcactgatatgaagcccgaactcgctggttttgcacttttgaaaacataaccgattacgtgcttaagcttctgaacctaagaggatgctatgggaaacacatcaatacaaacgcagagttaccgtgcggtagataaagatgcagggcaaagcagaagttacattattccattcgcgctgctgtgctcactgttttttctttgggcggtagccaataaccttaacgacattttattacctcaattccagcaggcttttacgctgacaaatttccaggctggcctgatccaatcggccttttactttggttatttcattatcccaatccctgctgggatattgatgaaaaaactcagttataaagcagggattattaccgggttatttttatatgccttgggtgctgcattattctggcccgccgcagaaataatgaactacaccttgtttttagttggcctatttattattgcagccggattaggttgtctggaaactgccgcaaacccttttgttacggtattagggccggaaagtagtggtcacttccgcttaaatcttgcgcaaacatttaactcgtttggcgcaattatcgcggttgtctttgggcaaagtcttattttgtctaacgtgccacatcaatcgcaagacgttctcgataaaatgtctccagagcaattgagtgcgtataaacacagcctggtattatcggtacagacaccttatatgatcatcgtggctatcgtgttactggtcgccctgctgatcatgctgacgaaattcccggcattgcagagtgataatcacagtgacgccaaacaaggatcgttctccgcatcgctttctcgcctggcgcgtattcgccactggcgctgggcggtattagcgcaattctgctatgtcggcgcacaaacggcctgctggagctatttgattcgctacgctgtagaagaaattccaggtatgactgcaggctttgccgctaactatttaaccggaaccatggtgtgcttctttattggtcgtttcaccggtacctggctcatcagtcgcttcgcaccacacaaagtcctggccgcctacgcattaatcgctatggcactgtgcctgatctcagccttcgctggcggtcatgtgggcttaatagccctgactttatgcagcgcctttatgtcgattcagtacccaacaatcttctcgctgggcattaagaatctcggccaggacaccaaatatggttcgtccttcatcgttatgaccattattggcggcggtattgtcactccggtcatgggttttgtcagtgacgcggcgggcaacatccccactgctgaactgatccccgcactctgcttcgcggtcatctttatctttgcccgtttccgttctcaaacggcaactaactgaacatattttccgaataaagtgaggaatctgtaatgaaaaaaatcagcttaccgaaaattggtatccgcccggttattgacggtcgtcgcatgggtgttcgtgagtcgcttgaagaacaaacaatgaatatggcgaaagctacggccgcactgctgaccgagaaactgcgccatgcctgcggagctgccgtcgagtgtgtcatttccgatacctgtatcgcgggtatggctgaagccgctgcttgcgaagaaaaattcagcagtcagaatgtaggcctcaccattacggtaacgccttgctggtgctatggcagtgaaaccatcgacatggatccaacccgcccgaaggccatttggggctttaacggcactgaacgccccggcgctgtttacctggcagcggctctggcagctcacagccagaaaggcatcccagcattctccatttacggtcatgacgttcaggatgccgatgacacatcgattcctgccgatgttgaagaaaaactgctgcgctttgcccgcgccggtttggccgtcgccagcatgaaaggtaaaagctatctgtcgctgggcggcgtttcgatgggtatcgccggttccattgttgatcacaacttctttgaatcctggctgggaatgaaagtccaggcggtggatatgaccgaactgcgtcgccgtatcgatcagaagatttacgacgaagccgaattggaaatggcactggcctgggctgataaaaacttccgctatggcgaagatgaaaataacaaacagtatcaacgtaatgccgagcaaagccgcgcagttctgcgcgaaagtttactgatggcgatgtgtatccgcgacatgatgcaaggcaacagcaaactggccgatattggtcgcgtggaagaatcacttggctacaacgccatcgctgcgggcttccaggggcaacgtcactggaccgatcaatatcccaatggtgacaccgccgaagcgatcctcaacagttcatttgactggaatggcgtgcgcgaaccctttgtcgtggcgaccgaaaacgacagtcttaacggcgtggcaatgctaatgggtcaccagctcaccggcaccgctcaggtatttgccgatgtgcgtacctactggtcaccagaagcaattgagcgtgtaacggggcataaactggatggactggcagaacacggcatcatccatttgatcaactccggttctgctgcgctggacggttcctgtaaacaacgcgacagcgaaggtaacccgacgatgaagccacactgggaaatctctcagcaagaggctgacgcttgcctcgccgctaccgaatggtgcccggcgatccacgaatacttccgtggcggcggttactcttcccgcttccttaccgaaggcggcgtcccgttcaccatgactcgtgtcaacatcatcaaaggcctgggaccggtactgcaaatcgcggaaggctggagcgtggaattgccgaaggatgtgcatgacatcctcaacaaacgcaccaactcaacctggccaaccacctggtttgcaccgcgcctcaccggtaaagggccgtttacggatgtgtactcggtaatggcgaactggggcgctaaccatggggttctgaccatcggccacgttggcgcagactttatcactctcgcctccatgctgcgtatcccggtatgtatgcacaacgttgaagagaccaaagtgtatcgtccttctgcctgggctgcgcacggcatggatattgaaggccaggattaccgcgcttgccagaactacggtccgttgtacaagcgttaatacattactccctgatgtgatgcccggtcgctccggctaccgggcctgaacaagcaagagtggttagccggataagcaatgttatccggctatattgcaggagcgattatgaaacaagaagttatcctggtactcgactgtggcgcgaccaatgtcagggccatcgcggttaatcggcagggcaaaattgttgcccgcgcctcaacgcctaatgccagcgatatcgcgatggaaaacaacacctggcaccagtggtctttagacgccattttgcaacgctttgctgattgctgtcggcaaatcaatagtgaactgactgaatgccacatccgcggtatcgccgtcaccacctttggtgtggatggcgctctggtagataagcaaggcaatctgctctatccgattattagctggaaatgtccgcgaacagcagcggttatggacaatattgaacggttaatctccgcacagcggttgcaggctatttctggcgtcggagcctttagtttcaatacgttatataagttggtgtggttgaaagaaaatcatccacaactgctggaacgcgcgcacgcctggctctttatttcgtcgctgattaaccaccgtttaaccggcgaattcactactgatatcacgatggccggaaccagccagatgctggatatccagcaacgcgatttcagtccgcaaattttacaagccaccggtattccacgccgactcttccctcgtctggtggaagcgggtgaacagattggtacgctacagaacagcgccgcagcaatgctcggcttacccgttggcataccggtgatttccgcaggtcacgatacccagttcgccctttttggcgctggtgctgaacaaaatgaacccgtgctctcttccggtacatgggaaattttaatggttcgcagcgcccaggttgatacttcgctgttaagtcagtacgccggttccacctgcgaactggatagccaggcagggttgtataacccaggtatgcaatggctggcatccggcgtgctggaatgggtgagaaaactgttctggacggctgaaacaccctggcaaatgttgattgaagaagctcgtctgatcgcgcctggcgcggatggcgtaaaaatgcagtgtgatttattgtcgtgtcagaacgctggctggcaaggagtgacgcttaataccacgcgggggcatttctatcgcgcggcgctggaagggttaactgcgcaattacagcgcaatctacagatgctggaaaaaatcgggcactttaaggcctctgaattattgttagtcggtggaggaagtcgcaacacattgtggaatcagattaaagccaatatgcttgatattccggtaaaagttctcgacgacgccgaaacgaccgtcgcaggagctgcgctgttcggttggtatggcgtaggggaatttaacagcccggaagaagcccgcgcacagattcattatcagtaccgttatttctacccgcaaactgaacctgaatttatagaggaagtgtgaaatgctgaaaacaatttcgccgttaatttctcccgaactattgaaagtgctggcagagatgggacatggagatgaaattattttttccgatgctcactttcccgcccattcgatgggaccgcaggtgatccgcgctgatggcctgttggtgagcgacttgctccaggcgattatcccgttatttgaactggacagttatgcaccgccgctggtgatgatggcggcggtagaaggtgacactctcgatcctgaagtagaacgacgttaccgtaatgcgctttcactacaagccccgtgtcctgacatcatccgcatcaatcgttttgcgttttatgaacgggcgcaaaaagcctttgcgatcgttatcacaggcgaacgagcgaagtacgggaatattcttttaaaaaaaggggtaacaccgtaatctcataccggtacgcccgcatgacgcgggcggttatcgaatgatggggtgaaaaatatgaaagcggcacgccagcaagcgatagtcgacctgctgctgaaccataccagcctgaccacggaagctctctctgaacagctaaaggtcagtaaagaaaccattcgtcgcgatctcaatgaattacagacgcagggtaaaattctgcgcaatcatggacgcgctaaatatatccaccgtcaaaatcaagacagtggcgatccctttcacatcaggctgaaaagccattatgcgcataaagcagatatcgcgcgcgaggcgctcgcgtggattgaagaagggatggtgatagccttagacgccagttcaacttgctggtatctggcacgccagttgcctgacatcaacattcaggtcttcaccaatagccatccgatttgccatgaactcggtaaacgcgaacgcattcaactgatcagttccggcggcacacttgagcgcaaatatggctgttacgtcaatccctcgctgatttcccaacttaaatcgctggaaatcgatctgtttattttttcttgtgaagggatcgatagcagcggcgcactgtgggactccaatgcgatcaacgctgattacaaatcgatgctattaaaacgtgccgcgcaatcgttgttattgattgataaaagtaaatttaatcgttcaggggaagcccgcatcgggcatctggatgaggtaacgcacattatttctgatgagcgccaggttgcaacttctttggtaacagcctgacggaaagggtagcaggccggagacgacgccccggccttgcctgttatcgctcgtcgcgacgaccacccaccgcagcccagatgcggcggacgtgcaccgtcacttcttcgcgatcgtgatacaactgccgcgcctgaatctgagcatttatgccatgttcatcaagctgtgcctgaatatacgccagattgtgtgacacttcttcgtagcgttttttcatcggcagtttgaggttgaaaatggtttcacggcaccagccattaaccagccactgcgccatcaatgccgcaactttcgccggtttttcaaccatatcgcataccatccaggagatattgctgcgcgtcggacggaatttgaaaccgtcttcccgcagccacgtcacctgtccggtatccatcagactttgcgccatcgggccgttgtcgacggaataaacccacatgttgcgcttcaccagttggtaggtccagccgccagggcaagcgcctaaatccaccgcccacatcccgttcgccaggcgttcatcccactcatccgcaggaataaacacatgaaatgcctcttccagtttgagcgtggaacgactcggcgcatctgccggaaatttcaggcgcggaatgcccatatagaacggcgaattattgttgctgtatgagtaaccggtatagcagcagcctggtgcaataaagaatacatgcacaaccggacgcttcggcgtttcatagttcgccagcaccccggcatcgcgcaaggcagcgcgtagcggaacagtaaatttacggcagaatttcagtaactctttgctttcgttggtatcggcaacttcaacacgcagttcaccgcccttctctactacgccctgtaacatgccgacaatgggggtaatacgatcttctggcggcaaatgctgcaggagttcccccaccacaaaccactggcgggcaaaaattaatgaactgaacggcagctcacggattaacttatcgccatcatcaggttgataacattcataaatgacataacccgcattctctttcacgcgggcaaaaccgaaaatttcccgctggccggctttatcggtaatttctgcggcgcactctttttcaaagcccggacggcacagcaatacaaccttattcatgacttacgcccttgcgctttaaacggatagcaccaactaacattaacgcccagcccgcgaggaagctcacgccgccaaccggagtgacaaacgcccacaaacgcagatgggacagcgccaggcaataaaggctgccgctgaacaacaccgtgcctaacgcgaggaaaacgctactccagtaaaaccagatactgatgcgacgctgcattgccaccgccagacctaagatcgccagcgtatgaaacgcctggtattcgaggccggtctggatccagcccatctcaacggcccccatggttttacttaacacatgcgcgccaaaagcgcccagagccacaaaaatgaagccgctaatggcggcgaaaatcagcataaaacggctggtcatggtcgtaccctacgtaaattattgttcataacgaaagcggaatttttcttgttcagcagcggctttcgccaggatccattggcgaaaggcggctattttacccagttctgcctgactgtcatgacaaaccagataaaaagcatttttactgaccagaacatcattaaacgggcaaacaagacgtccggcctcgatttcagattgcgccatcacgttatttgccagcgccactccctgcccgtggatagccgcttgcagcaccatggcgctatggctaaaaattggcccttgctgaacgttgatatgatttaaccccaactgtcgggtatatgtctgccagtcacggcgcgaagcatcatgtaataacgtatgtttagccagatcttccggtgtcttcaagggtttttcgccagtcagcagtagcggcgaacacaccggcaataaatattcggcgtacagtttttccacccgtagccccggccagttgccccgaccataaaatatcgccacatcaacatcatccgccagcttatcttcctgacgatcaaccgcctggattcgaacgtcaattcccggataagctgaattaaagctggaaagtcgcggaaccaaccaatgaatggcgaaactggggagtaaactgaccgtcaacgcccccttggcgctacgggcctggagtttacgcgtcgcttcggttaattgcgaaaatatctctttgatatcgaggaaatagctttgcccttcctcggtcagcaggagtgaacgattacggcggcggaacagttttagccccaaaaaatcctcaagagacttgatttgatgacttactgcggcttgggtcacaaaaagctcttctgctgcgcgagtgaaacttaaatggcgtgctgcggcatcaaaaactcgtaaggcatttagcggtggtaatcgtttagacatggctattaaactttgatgttaaatgaatttaacaattagatcacactatgtaacctattagtttttttaatctgagccattataaattgtccgttgagcttctaccagcaaatacctatagtggcggcacttcctgagccggaacgaaaagttttatcggaatgcgtgttctggtgaacttttggcttacggttgtgatgttgtgttgttgtgtttgcaattggtctgcgattcagaccatggtagcaaagctaccttttttcacttcctgtacatttaccctgtctgtccatagtgattaatgtagcaccgcctaattgcggtgcttttttttaccttgcgatcgcgaattactgatccagttcgaccatctctttcacgtcagtacggttgatctgctgtttgttgccattagcgtctttatacgaaatcataccggtatcgttatcagtctgtggtttgccgtcagagacgatggtacgtccgtcattggtgtgcatcacatagttcgaaccggaacaggcgctcagggcaaaagtcagcatacaggcagaaataattgcggcagtctttttcatcatcttctccttaaagcgattaataaatcttaatagtattgattaacaggctaaaattaacgcctaacactattcagcatatgttacttacgcggcttcgccaggatatccagataattctgatggttagcactctccttgtatcaaagtgaattttgcgtcacgatcggtgcatcaagccgaggagtaccatgaacgtttttaatcccgcgcagtttcgcgcccagtttcccgcactacaggatgcgggcgtctatctcgacagcgccgcgaccgcgcttaaacctgaagccgtggttgaagccacccaacagttttacagtctgagcgccggaaacgtccatcgcagccagtttgccgaagcccaacgcctgaccgcgcgttatgaagctgcacgagagaaagtggcgcaattactgaatgcaccggatgataaaactatcgtctggacgcgcggcaccactgaatccatcaacatggtggcacaatgctatgcgcgtccgcgtctgcaaccgggcgatgagattattgtcagcgtggcagaacaccacgccaacctcgtcccctggctgatggtcgcccaacaaactggagccaaagtggtgaaattgccgcttaatgcgcagcgactgccggatgtcgatttgttgccagaactgattactccccgtagtcggattctggcgttgggtcagatgtcgaacgttactggcggttgcccggatctggcgcgagcgattacctttgctcattcagccgggatggtggtgatggttgatggtgctcagggggcagtgcatttccccgcggatgttcagcaactggatattgatttctatgctttttcaggtcacaaactgtatggcccgacaggtatcggcgtgctgtatggtaaatcagaactgctggaggcgatgtcgccctggctgggcggcggcaaaatggttcacgaagtgagttttgacggcttcacgactcaatctgcgccgtggaaactggaagctggaacgccaaatgtcgctggtgtcataggattaagcgcggcgctggaatggctggcagattacgatatcaaccaggccgaaagctggagccgtagcttagcaacgctggcggaagatgcgctggcgaaacgtcccggctttcgttcattccgctgccaggattccagcctgctggcctttgattttgctggcgttcatcatagcgatatggtgacgctgctggcggagtacggtattgccctgcgggccgggcagcattgcgctcagccgctactggcagaattaggcgtaaccggcacactgcgcgcctcttttgcgccatataatacaaagagtgatgtggatgcgctggtgaatgccgttgaccgcgcgctggaattattggtggattaatgacaaacccgcaattcgccggacatccgttcggcacaaccgtaaccgcagaaacgttacgcaataccttcgcaccgttgacgcaatgggaagataaatatcgccagttgatcatgctggggaaacagcttccggcattgccagacgagttaaaagcgcaggctaaagagattgccggatgcgaaaaccgcgtctggctgggatatacagtggctgaaaacggcaaaatgcatttctttggcgacagcgaagggcgcattgtgcgcggcctgctggcggtgttgttgactgccgttgaggggaaaaccgccgccgagttgcaggcacagtcaccactggcattgtttgatgagctgggattacgtgcgcagcttagcgcctcacgcagccaggggttaaatgcgttaagcgaggcgattatcgctgcgacgaagcaggtttaagcacagaaccgggtcggataagacgttcgcgtctcatccgacctgattgtttaaccctgacgcgccgctttcgccatcatcttcttcagcgcatgagaaaccgcaacaaacccaaaggtggcggtcaccatcgttgccgcgccaaatccagatgcacaatccatccgcttcggcccttctgccgtggctttcatcgcacacaccgtaccgtctgactgcgggtacaccagcgcttcagtagaaaacacgcaatccacgccgagcttacctttactgtttttcactacgccaaaatcgcttttcaggcgctcgcgcaacttcgccgccagcgggtcctgaatcgttttcgccagatcggtaacctgaatctgcgtcggatcaatctgcccacccgcgccaccggttgtgaccagtgggattttattgcgccgacaataagcaatcagcgccgctttgggccgtacactatcaatggcatcaatcacgtacgaataacccacgctcatatactgcgctacgttatccggcgtcacgaaatcatccaccaccgttacacggcactccgggttaatctggcgaatacgctccgccataacttccgcttttgccagcccaacgttatcgcgcagggcatgaatttgccgattggtattggtgacgcacacatcatccatatcgataagcgtgattgcgccaatccccgtgcgcgccagcgcttccgccgcccaggaaccgacaccaccgataccaaccacacaaatatgcgcgtcagcaaacagttgcaacgctttttcaccatacagacgcgctgtgccaccaaaacgctgacgccatgcatcactaattaccacagacatagcacctcagaattaaaaagggcgaggttatccctcaccctaaacgcataaatgcctgatgcgctacgcttatcaggcctacataactcctgcaatattttggatttgcatgatttgtaggccggataaggcgttcacgccgcatccggcatgaacaacgcgcacttagtcaataatcaggatgtgaggttacccctcaccctgtcatatccgtaaaaacggcatacagaatatcacatcagccgctaaagacgttacctgcgcccggggcggttttcagcacccagacacgtccatagtggttgtaccaacctgcgcggtgtccggcttccggcccgatcccttgatagatatcgaagtgttggcctttgattgcaccaccgacatccagcgccaccatcagacgcagttcgtactgaccattaaatttgccgttattatccagcaacggcacttctgccagcaaggtagtacctggcggaataatggaacgatcagaggcaactgacgcgcgaccaaccagcggcaccgcacttgcccctttcaccggagcaaaagattgcggtttaaagaagacgaaagacgggttctgttccagcagctcgcgaacctcggcttcactgtgtgtttcgccccagtgacgaatcgcctgcatcgacatatcttcttttttcacttcgccacggtcgatcagcaccttaccaatgctgcgataggcatgaccgtttttccctgcatagctgaaaaagttaagcggactgccatcaccaaagtcgatatacccactaccctgcacatccataatgaagttatccatcagggagttactgtaagcgagaatatatttatcactcaatgcccccgcgtagatctccgcacgagacggcagacgaccacgttttggcggcatacggtaaataggatactggaactcgccctggcgggtatggcgcgcctgaattaccggcgtgtaataaccggtaaactgcacgttaccatagttgtcggcaccttccatctgccaggcatcaatgccgaactggcgcatattgcgggtatcaccgcctgcgcgcagccactcttgcaccgcgttataaacattactctggttgccatacagacgcggtgacgaattacggatatggttaatttgctcggcaaaatcaccggcgttaatcggcgcgccaacggcatctggctggttcaccagagagaaaggctgggtaaatttcccgtctttatattgctgtccgcgatcggttggtttggaagagcaggcggcaagcattgccacaaccgtgcccataagaaggtactttacccaacgtcctttcattgttctcttcttcaggttaaaaaataaggcgcaacgaagataacaaaccgccgcgtttaatgaaatgagcagcctctccctgacgcaaattttgcacaaaaaataggctttagtgatttgtttttgttcaaaatcatgccaaatccgtgatcggggtaaaaaaaaggttgcatgaaaacgcgagcggagtatagtgcgcatccacggacgcggggtggagcagcctggtagctcgtcgggctcataacccgaaggtcgtcggttcaaatccggcccccgcaaccaattaaaatttgatgaagtaaagcagtacggtgacgcggggtggagcagcctggtagctcgtcgggctcataacccgaaggtcgtcggttcaaatccggcccccgcaaccaatcaaatttgatgaagtaaaagcagtacggtgacgcggggtggagcagcctggtagctcgtcgggctcataacccgaaggtcgtcggttcaaatccggcccccgcaaccaattattgaacaccctaacgggtgtttttttgtttctggtctcccataaaaaagcgccattcagcgcctttttatcatccccttctcgccagcgtcgccccatcggcaaaatacgctttaatccccgcaagaatagactccgcaacttcctgctggaaagtcgccgttttcagtttacgctcttcctcaacgttactgataaacgccgtttcgaccagaatggagggaatatctggtgcctttagtacggcaaacccggcctgttcaacttgatttttatgcagcttgttgattttaccgagcttattcagtaccgctttaccaaacttcaggctgtcggcaatggtcagcgactgtaccatatcgaacatggtgtggtcgacatagcggtcaccgcttttgctcacgccaccaatcaagtccgaggcgttctgggtttgtgccagatattttgccgcagtactggttgcacctttggttgagagcgcaaacacagaggaaccgctcggctgacgactggtaaaggcgtcggcatggatagagacaaacaggtcagcacgctgtttctgggcttttgctacgcgcacttgcaatggaatgaagatgtcttcattgcgcgtcatgtacaccttcatattgccctctttctcgatcagagagcgcaaacggcgagctatttgcaataccacatctttttcgcgcgttttgtatttccccaccgcaccggagtcttcgccaccgtggccagggtcaagcataatgacaatcggacgatcgcgccctgctttacccggttgtggaccactttgcgctggcggcacctgcttttcgaggtcgcctttgttgtaatcctccagcagcgccagcagcgggtcctgcatatcctgtgcattggccggatagaggtccatcaccagacgctctttaaacccggcgaccggcgcaagggcaaacagctgcggttttacgttttgctttaattcaaaaaccatccgtacggtttgcgggtcaaattgcccgacgcgcgccgacttgatgaacgggtcgtctgcacgaatttgtgccgccatccccttgagtaccgagttcaggtttacatcttcgatatccaccaccacgcgttcagggttactcaacgcgaactgcttatatttcagctgacgatttgattccaccgtcacgcgggtgtagctggacgcaggccagacgcgcaccgccacgacctggctgaccgcagccagactgacctgacttacgctcaatagccacatggcacccgcgccttgcagtaaacgacgacggctgattgcagtgttggatcctgacatgcctctcccgagcaaaagaaatctaagctgtgtaacaagtaaacgactaatttgaccggaaactttagcgaaagacgcataatctgtcatctaataaacggtaaacattctttttatattcacggcattactgataaaaaagtcgctctcgcataaaatttacacttgcaccctgcgaaaaaacagaataaaaatacactaatttcgaataatcatgcaaagaggtgtgccgtggtaaaggaacgtaaaaccgagttggtcgagggattccgccattcggttccctatatcaatacccaccggggaaaaacgtttgtcatcatgctcggcggtgaagccattgagcatgagaatttctccagtatcgttaatgatatcgggttgttgcacagcctcggcatccgtctggtggtggtctatggcgcacgtccgcagatcgacgcaaatctggctgcgcatcaccacgaaccgctgtatcacaagaatatacgtgtgaccgacgccaaaacactggaactggtgaagcaggctgcgggaacattgcaactggatattactgctcgcctgtcgatgagtctcaataacacgccgctgcagggcgcgcatatcaacgtcgtcagtggcaattttattattgcccagccgctgggcgtcgatgacggcgtggattactgccatagcgggcgtatccggcggattgatgaagacgcgatccatcgtcaactggacagcggtgcaatagtgctaatggggccggtcgctgtttcagtcactggcgagagctttaacctgacctcggaagagattgccactcaactggccatcaaactgaaagctgaaaagatgattggtttttgctcttcccagggcgtcactaatgacgacggtgatattgtctccgaacttttccctaacgaagcgcaagcgcgggtagaagcccaggaagagaaaggcgattacaactccggtacggtgcgctttttgcgtggcgcagtgaaagcctgccgcagcggcgtgcgtcgctgtcatttaatcagttatcaggaagatggcgcgctgttgcaagagttgttctcacgcgacggtatcggtacgcagattgtgatggaaagcgccgagcagattcgtcgcgcaacaatcaacgatattggcggtattctggagttgattcgcccactggagcagcaaggtattctggtacgccgttctcgcgagcagctggagatggaaatcgacaaattcaccattattcagcgcgataacacgactattgcctgcgccgcgctctatccgttcccggaagagaagattggggaaatggcctgtgtggcagttcacccggattaccgcagttcatcaaggggtgaagttctgctggaacgcattgccgctcaggcgaagcagagcggcttaagcaaattgtttgtgctgaccacgcgcagtattcactggttccaggaacgtggatttaccccagtggatattgatttactgcccgagagcaaaaagcagttgtacaactaccagcgtaaatccaaagtgttgatggcggatttagggtaagcgatgaaaatcgtcggatgcgacatgcgtaacactcgtacgtcgcatccggcaattacgtttattcccgtgaactaaacaacgccgccagaccactgcgccgctcagtacgagtggcgattgccgcacttaatatgcgctcatcggcatacagcgacagacggcgacgcgcgcgggtcaccgcggtataaaccagctctcgcgttactaccggcgtgcgttggctcggcaaaatcaacgccgcatggtcgaactccgatccctgcgatttatgtaccgtcatcgcccacgtagtttcgtgctctggcaagcgactcggttgcacagacttaatattgccgtccggcatcgcaaaccagacgcgcgtcccctgcccgcgatccagcgcaataccgatatcgccattaaacaacccaagcgcgctgtcattacgggcaatcatcaccggtcgaccttcgtaccaacgagagtgcggatgacgatgaattttgcgcttctgttgcataaactgctcaattcgctcattcagtccagccacgccaaacggcccttcccgcagggcgcacaaaagctggtactcattgaacgcctgaatgattaaatccggctcggcacgcgcttgcagcagatccagataacgtccgtaacccgcaagagcttcctcaagcatcgcaatataatcttcgccgctctgtaaaagccgtttttcgatatcagtaaaatcctgctgaaaaacggttttcactgccgttttatcaccacggttgatcgccgcagctaactgaccaatgccagaatcgctgccgaaacgatagcttttttgcagcaggcagagactgtcgcgcaaagatgccgcttctgtgccggttcctgccggaacgtgagtccccgtcaggcggcttagctgcctggcacgctcggcggtaaagcccgcgttggcataagcgcagatatcgcccagcacagccccagcctcaaccgaggccagttgatcacgatcgccgagaaagatcactcgcgcatgatcgggcaaggcgtcgatcagtctcgacatcataggcagatcgatcattgacgcttcatctaccaccagcacatcaagatgcagcgggttaccggcatgatgacgtaaacgctggctacccggctgcgcgcccagcaatcggtgcaaagtgctggcatcttccggaatgcgtttcttttgttcatcggtcagcggtaactgtcgcaaagccttgccgagagattcggttaagcgcgcggcagctttacccgttggtgcagccagacggatacggcagcgttcgccgtcggccatttgaattaacgctgccagcaacttcgctacggtggtcgttttaccggtgccagggccgccggaaatcaccgagatccgccgcgtcagcgccactgccgccgcaactttttgccagttaatttcatcgcttactggaaaaagtttgtccagggtttgcgccagtagagcttcatcaacctcaatggcatgattcacttcgttgaaaaagcgtgccactgtgcgctcgttacaccacatgcgattcaaataaagacgatcgccacagaggatcatcggcgtgggttcatctcccctgctgaccgcttgagaagccagcaagcattcttcccaattttgtagctcaccgatttcactgacacaggtcgccaacagcggatgcgacgcctcgttattttccagtcgtgaaagcggcaaacaaacgtgtccctctccggcatcatgacttaacagtgccgccgcgagggtgacggcaggatgttcatctcccgccacggtcagggcaaattgcacatccagcgggcgtagctgtttgtgctccacagcttccagtaattgcttttgcaatttcattacgcctcctccagggtcataccggcaaacatctcatccatcagggcaatcaacccggcgttgggtcgggttgtgtaaatcccctgttgcggatgttctttatcaacgccacgcaggaacagataaataacgccgccaaagtggtgctcatagtcgtaatcagcaatgcgatggcgcagataacgatgcagcgccagggtataaagctgatattgcagatcatagcggtgtgcctgcattgccgctgccatagcctgttgggtgtaagccgaactgtcttcacccaaccagttggatttatagtcgagcaggtaataacgcccttcgtggcggaacaccaggtcgataaagccttttaacatgccacgtacctgcatgaactccagcggcgggcagcctgcggatagcgggtcaaactggcggattaacgtatcaagctgactggcgataagcggttcactaatcggcagataaaactccatctccacctgtttattgcgggcggaaagttgactcaggcttacgccggtttcattgagaggtgcctggaggacagccgtgatccactcggtcaataccggttcccactgcgattcaaagccgccgagttccagtttttcccgcacccagttcgggtcaaccggctgggtaaaatccaggtcttcaaacaaactgtgcaagaacgtccccggtgacgcaccgcgcggaaactgatgtggtgttaacgtcggttcttcaacgacgctggcaacgcctgcagcatcgacatccagccgaggcatcaaatcctgggcgataccgtgaccacgctgttgcaaaccagagtagctggtgacgcgccagttatcgccgggcaatcgttgtaacgtcttcgcattcagctctgctgtagaaacatcattaacctgccagggttggttatcaccagtttgtgccgtttgccaggcaatatcatcatcgcataacgcttcaatacaggtgcgaagccctgccgcatcttgcggttcccctttttgcagcaaacgcccgagcgcactttggtggacgtcggtgtcaccttttttatcgccacgacggcgcaccagcggtgcaacgccgagactgcaatgccaaaccgaacgtgtcagcgccacgtaaagcaaacgcagatcttccgccagacgttcggcctccgcgaggtcgacgctttctggcgcagcattaagatccagaactgcctcaaacgagtggcgatcgtgataaaacgcctgctcctggacgcggaaattggtgataaacggcagccagaccaatggatattccagccctttcgatttgtggatcgtgacaatctgcaccagatgtttatcactttcgagacgcatttgttggctggaggcattactgtctggctcgaggatatgttgcgataaccagcgtaccagcgcatgttcactttccagctgcgttccggcttcttgtagcagttcgctgatatgcaagatatcggtaagacgccgctcaccgcctgccgttgccagcaagttttcagcaatgttacgcgccgacatcagcgcccgcagcatcggcataacgccacgtttgcgccagatttgccgataaccatcgaactcttcgactaccacatcccacgcatgttcgtcattgttcagcgtttcgatatccagcgcgttcagccccatcattgacgttgccagcgcactacgcagggtgttctcacgttcgggcgtcatcaccgcctgcaacaaccaaagcatttcctgcgcttccagagtttcaaaaacactgtcgcggttcgaaaggtaaacggaagggatttccagcaacgttaaggcatcgcgcacctgggcggcctcctggcggctgcgcaccagcacactgatgtccgaagcacgcaccggacgcgcgtcgtcgccgttcatcagcaacgcttcgccccgctgtccggcttgtagccagtcgcggatttgcgcagcacatacctgcgccatggtactttgataatcgccaacgccgcagctttcgccttccatcagccacattttcatcgcaggctgtgtttcacctttaaatacaaaacgtaacgcctgatttttcccggctgatttcactggaataaacggtatttcgcgaaacatgaacgcgtcatcagtctggctgaaaagcttattcacgctgttcaccattcctggtgcggaacgccagttggtgtctaaagtgtagtgggcgtgaacttcgctacgcgccttcatataagtgaagatatccgcaccccggaatgcatatatggcctgcttcgggtcgccaattagcaacaatgcggtttccggctgatggtgccagatacggcgaaaaattcggtactgctgggggtcggtatcctgaaattcatcgatcattgccaccgggaatcgcgtacggatcgccgctgccaacacctcaccgctttcgctacgcagcgcggaatcgagccgacttaacatgtcatcaaaacccaattcgccacggcggcgtttttcacgcgctactgtttcgcggatctcagccaatgcgcgggtgatcaccagatcgcggatcgacaatggttctgcaagcagttgatcgatcgcctcaaacagtggatgtcgcggggtttcccccccggccttcgtgcgatcttctaagaaacgctgggagaatttttccagcgactccggcaactgataactgtttgtctcttcttctgcccaggcgctgatcttgtcgatccatttagcctgattgctacggttaaacttgcgtcgatcaataccagaagattcgatcagcgcatccagttcacccactgcgtcgcgccactgctgttttaccgtatcaatacgcgccacaatttgcgcgtgacgggaagccagcgtttcatcatcgggcggcggtgctttgataaccggcgcttcgccttgcagataacgattaatatcgcgcagcaacgcctgcggccctttccaggtttcaaagacgacctgggctatttcacgcggcagcgggtagcagtggcgacgccagaaatcggcgcaggcctggtagcgtagcagagactcatcttcaatcagctgctgctcaaacagcatgccggattcaaaggcattcaggttgagcatgcgctggcaaaagccgtgaatagtaaagactgccgcttcatccatctgccgttcggctaacaacaaccactgcgcggcttgcgctttatcgtcgatctcttccagcaggcgttcgtacagtggattgtcggtggtttcacgcagacaggcgatgcgcaactcgtggatattgctacggatacgaccgcgcaattctgccgtggcagcctcggtaaaggtgaccaccagcagttcttcaacggtcagcgggcggggaaaggcggcggaaccgcctagtccaagtaacaggcgcaaatagagcgccgcaatcgtaaaggttttgcctgtgccggcagaggcttcaatcaggcgctcaccctgtaagggcaagcgcaaaggatctagtgtctcggcgacatcactcattcttttcactcatcaggggcattgtttgctgcaacgcgctgacgttctcccacactttccagccttcagggtgtacatattcggctttcccgttctggctgccggaaatctgcgacagaatagccatgccttgcggctcgaccaccgcctgatggaagaaatcagcaagtttttgcggcgtcagcagttttatctgggccacgattttatcacgcgaatcgaagcgcatattgccgcgatcgaaatctttacttaacttcgatgcttcttcgccgagcgtttgcggtgcctgcagcatctgggtaattaccgcctgctggatttgcgcaaactcatctggcttcatcgctcgcaattttgcctctgcggttgggaaaaacgccttgtaacgctcccacaagaatgaaggctgtttatcattgctttgcaaaaggaagcccatgccccactgacgccccacgctcattggaaacgcaaacacggcatagcccaattgttcttcggtacgcaactgattgtagaaccacggctgtacgatctgccccaacagagagctataggctgagctggtgtattcatcgtagccagtcggtacaaataccgctgccagtgcggagtcggtgctgttaccggctttttcaaagatgacggattgttttttatcgaccactacatctttgtttcgacaccactctgaaccatcagcgcccaactgtttttgcacatcgcgtgccagcgttgttgcctgggcctcggtcatgttgccgataaccataaactctggtcgagcccctgattttaaggcgtcgcgataggccagcacctctttcaacgtaatggagggcaaaattttacgccgttcatctcgcgagaagtacggcacttgcgagagcatctgcgcgggcataatcgcctgctcaaacgctttacccttttctgcggaatccatcatctggttataccaggacttcgcctgctcaagctgatcttccgtagcggtatagctaaagtacccctcgagcaatgcctggaacagctgcggcagacgctgggtgtaaccattagcattaaccataaggccgttgttagcgttggtggaaaaacttatgccaccaaccgacgcctggttgcttaactgatcaagcgccagccctgcgagataatcattgagcgcaaacatcacctgattgcgggcgctgtccatggctttcggattacgcaaaatcaggctgacatcagctttgggctcgctggcaaaataacggcttggcgcatacaccacgcgcagattcgactcatcaacaatcagctctggatggtcgtatttcttctctgacttaatcagcgagaaatcatcaggaatataagggttaagctctggcaaagagagcgcaatgtcggcggcttttttctgccagtcggcgaaagtttgtgcgctgattttatcgacctgatacggcgcatcgacaaagtaagccgttttgttgtgcggctctttcgggctgatataccagatacgcgcattctgcggcgtcatcatcgccagacgttcctttactgctttagcatcgtaccgatcggcaatattgactgcatccagcgtatgctcaacaggaacgcgaatcatggtatctgccagccattcgacgtaatccatatcacgggtgatcgacggataacggaagtcgatatccagcacattcgccagttcatcgaagtattgtttatcaatgcctttttcacgtaacagattgagatagctaaaaattgccgccacaacctgatcgcgattagccaggcctttatcggttaaagacgcagagatcgctaatacgccgctgttgccgttgacgataggatcggagttggcgctaatgccctcaactaatccctgcttttgcagccagtcagaaagtgtacctgggctgcgattgccaatcagataggtaatcaattcatcggttttactacggaacttcgctgagttgttatcgatgcgaaactcaacgcgcaacactttacgcggcagcgcagggacgtaatgaatgataatgcccttttgcgcgtcggtgactaccggcacggtgatttccggttttttgctctctttgttcggcacgcgaccaaaggtgtccgccgccatttttgccaactccggcagcggtttattactgtaaataaccgccttcatcaaattggcggaatagtacttctcgtggaaatctttcagcgcctgctgcaccggattaccaggtttgtcgcttaaagtttcgaggttaccaccagaaaactttgaaccggggtgtgccgggttaatggtttctgcgctgacctgtgccatgcgcatcccgtcacgcgtacgcgccatggttaattcagcgttcaccgcattacgctcacgttcggcatatttcttgtcgagcaaaggttcagcaatagcatcggccaggcggtctaccgcaccaggcaaggcgtcgttctcaacttccagatagaaagccgtgcgatacggcgcagtgctggcattgtgactaccgccgtgcattttgagatattcggccagactgtcagcctgcgggtactttttcgaccccatcagactcatatgttcaaggtaatgtgccagcccctggtacgcctcgggatcttccagcgacccaacgggcaccaccagcgccgagagcgatttaactgcctgcggatcagaaaccagcaagaccaccataccgttatccagacgtatagcctgatactggcggttatctttatcacttttacggatggtttcctgaatcggctgccatcccgtttctgcctgacttaagggtgcccaaagggcaactaacaacaataatgctttgaaccaggtgctgcggggcattcacggacctcataatcaacttaattttctgtccagattcaacacgttaacgcaaatcatctgccagaatttaatcttgtgctgcacgagtcagcctatgtttatataaccatcagtccgtgactggtgcgcatcataaagtaagcggatagattgcgcaatttttatacagcactcatgactgattaaagcgaaacagcggtaacaggaaacgttgcgactgttcaacgatggcctccattgtctctggtgttaattgccgccagagcctttgataccagatatcatcaccttcgccacgcaccatcatgttgccttcgtaagcctgaaggaatttcgtacgggctttttgcaacgtggaatcgtcatccagcatggcatcgttttgcgcgtcataacaggtttttagccacgcgccgccactttcaggtaacaccagcaatggcgcggacattccttcacgatacccctcaatcagttgtgagaggtaatgcaaagcctgttcggctgcaagcggcggaaaacgccactcgccgtctttgcgtagaaaaaggcgactttcaccattaccaccgctggcacagtagacaaggtgttccagccaaagttgcattccctgggccacacttaataaagagggacgccagcgcaacaggccatccggctgcacctgcggcaaccagccagttatctgcacaccgttgcaggcgagatcaatttccatactctgccccggctggcgacaggcaatgactctgtcggcaagctgctgcatctcctggcactgtgtttcccagaaaatttcaccaaaagcgccatacggtaaatcccctgccgctcggaagcggcggaacaagcgttcggcatcatcctgctcaaccagtgcattcaataactgctgattgatttgataacggctaagtccttccagaataaatggctcggtgtcggggatttcgctgtcttcagtacggaagttcacctgcaaacgcatctggaaaaatgcccgcaccggatgtgcccagaatcgttgtagcgtttccagcggcacggtttccggtaaggtaaacggcagcggctgaacaaattcagaatgtgctttaccagcctggctggccgcaggtagccattcacgagcatagctttgtcgttcgcctggctggtagttttgtggatcaaacggcatccgggtatggaggcaagtaagatgcgcttttacccttgcctcgctttcatcacagttgagcgcttcatcgcccggtagataatgactttgcccgatgtagtcgatcagttcctgcaccagtaccgacgggaaacgctcactgttatcctgaatggaacgaccgatatagctgatatagagtttttgctgcgcggaaattaacgcttccaggaacagatagcggtcgtcatcgcgacggctacggtcgccacgcttcggtttctggctcatcaggtcaaagcccaatggcgcaagctgacgtggataaacgccgtcgttcattcccagcaggcaaaccactttgaacggaattgaacgcattggcatcagagtacaaatgttaaccggtccggcgagaaaacgctggctgatacgttcttgatccagacgctgtgccagttcatcacgcaatagtgacagcggcaccgcgtcgccatactgcgcacctaaaccttcggcgataatcgcctgccattgttgttcgatcagcgtcatcgccgcttcggtttccgcatccggcaggaagaaggcgttgagcatatcgcgacaaaccggcaaccactcttccagcggacgctcctgtgccagcccgcgacgccagatgtttagctgcattagcagtgaagccagatgccccaccagttctgcaattaagccgctcgattcatcataaggtagaaccgattgccactcgccctgcgcgctctccatcgcgtagcccaacaacatacgcgtcaggccaaatcgccaggtgtgttgtccggtggcggggagttccagctcgcgaacgttgtcgtcatctatgccccaacgaatgccggattcgttgacccactggcgtaaataacgcagcccttcttcggtgatgtcaaaccgcgccgccagcaccggcacatccagcaacgccagcacatcctctgacacaaaacgactgtcaggcagtgataacaggctgataaacgcttccagtaccggatgtgactgccgcgcacgacggtcggaaatggcgtaaggtaggtaacgatccgcaggtgcgctaccaaacacagcctgaataaacggactgtagctgtcgatatcagccaccatcacgatgatgtcgcgcggagtaagtgtcgggtcttcctccagcatcgccagcaggcgatcgtgtaaaacttcaacttcacgctgcgggctatggcaaacgtggaaggtgatactgctatccagtggatcaagcgggcgtttgttatcgctacgggaaaactcttcgatgttcacaccagcaacggcgcggttttccagttccagaatgtcagactgaatgttatgcagcaggttatctggcgtgacatcgacaaaggcgtccagctcctggctgctctccaggtcagaaaggagataaatgtagtcgcgcccaagcttaccccatgaagccagcagcgggttgccgacatcctgttcaccatcgctgttaaagagctgcccggcattttcgctatcacgaaatagcggcaattcgcgatcttcaaaactgtgtcgacgctgacgggtcagcagtttcgccagataagcaggatctttaatatcgccccagtaataacggcaggggttggtaaacaggagatggatttcaatatgtttacccagcgcctgtagcgcctggagataaacaggcggtaacgcggaaataccgcatataaagacgcgcgaaggtaaccccggcgggcaggtcgtcgcggactccagcgtttcgataaagcgctgatagagattggcgcggtgccagcgcggttgcccgagttgatgggtatattccaccagcgccttccacaacggggcttgccaggcctgtgcttctcccagcccttcaaccaaatgtcctgtttcccactgtgccagccagtccggacgatagaccagatactggtcaaacaggtccgccgcttttgaggaaagctggaacagttttcgcttgtcgctatcgtcagtcagataatgccgcaacagggtaaagtcttcgcgctccagcaattgcggcagcagagtcatcagtttccagctcatgctctgtttgttaaaggcgctctctttggggatttccggtaacacccggacgaacatatcccagataaagctcgctggcagcggaaaatcaatgtttgccgcaataccaaacttttgcgacagggtcatttgcagccactgtgccataccggtactttgcaccagaatcatctctggttcgaaaggatcgtccagccgttcgcgttcgacaataaactccatcaacgcttccagcacgtccagacgattggaatggtagacccttaacatagcggctcctgactactgacgattcgggcaatgcaggcgggtcatctcgccttctctgcccccgggtgaaactagcgtaacgctgatgctgacacatcccgcctgcgatgtctgcattcggttgacctgccagttggcaggtggcgaaatcgcgcgcagttgcgtttgctgccagccatgccgccagagctgttggtactggtttctgctggcaagactgttcattaatgttcgctggaaacccgataacgcagtgacaatcatcaccatcaacaccatcgccaacattacctccggcaggctaaagccttgttgattcttcagggaagctgacataacgccctctctttcagcggacaaaaatcgctccagccgcgtggcgaaaaaacaatgtttccatcaatgacttcgcctgttcgccacaacgaaacgccttcataaccggcaatcaataaggcttcattatctgccagtaaacgcaaacaaacctgggcatcggtttcagcgtactgcgagcactgaactgctggctgcgtctgccagcagtgcatttttccccacgccagcgccgactgaacgatggcctggcggcgcaatgactgactttccatgctcacgcgagaggcaaaactgcgatcctgttggctcattccttgtaatagcaaactacccaaaaccagcagcatcaggaccagagccagtgacgaaacacccttttcgcggttcacaggttgaatcctgtcacgctatagctggcattcaccacggtttgcggttcagacttactggcagcacgcatattaaccgtcaacaccggcgagaagccgctgacatcctgacgtacgacctgaaaagtgtcgataatgatggcatccggattagtgactttatcccagcccttaccttcacaggatgtcgcaccgcgtagcgtttccagcacatgctccttcagacgaaatccaatctggtcggactcttttaccggttcgcgatcccagataccgttactgttcgcatcccactgcacaatgacacagtcaccctgtccgacaatttccagcccttcgccggtacagatgccatgacaataacccgccctctggagatgcttcgcgacggtaaatacccgcagccagatttcatcttccagcgccagcttacgggtgctcgttaaactttcacgctgtaacgcaggcagaaagcgtgccgcccccagcaacaatacgctactgatcgccatagcaatcaacacttccagcagagaaaaaccttgctcttttacaggcatccttctgtttctccttgctgacaaagccggagtcttccccacggcgaaaccaccagccaccactcgcccgttgagtttttgaagcgaatatgcccggcccatgcggtattgcgcaggccaaagaaagcaagcgaaggtgtcaggtcgctcatttcgacttcgggccagcgtggcacaaagaccaatggtgaactgccatgacaggtattggccccagcagcggaactcacaaggcaccataacgtcccctccctgataacgctgatactgtggtcgcggttatgccagttggcatcttcacgtaaatagagcaaatagtcccgcgcctggctggcggtttgccatagccgttgcgactgctgccagtattgccagccatagagtccacttgcgcttagcatgaccaaaatcagcatcgcgaccagcgtttcaatcagcgtataaccacgttgtgttttcatgccggcagtatggagcgaggagaaaaaaagacgagggccagtttctatttcttcggcgcatcttccggactatttacgccgttgcaggacgttgcaaaatttcgggaaggcgtctcgaagaatttaacggagggtaaaaaaaccgacgcacactggcgtcggctctggcaggatgtttcgtaattagatagccaccggcgctttaatgcccggatgcggatcgtagccttcaatctcaaagtcttcgaaacggtagtcgaagatggattcgggtttacgtttgataatcaacttcggcagcggacgcggttcgcggcttaattgcagatgagtttgatccatatggttgctgtacagatgcgtgtcgccaccggtccagacaaaatcacccacttccagatcgcactgctgcgccatcatatgcaccaataacgcgtagctggcaatgttgaacggcaggccgaggaagacgtcacaggagcgctgataaagctggcaagagagtttgccgtctgccacatagaactggaagaatgcatggcacggtgccagcgccattttatccagttcgcctacgttccacgctgaaacaataatgcggcgcgaatccgggtcgtttttcagctggttcagtaccgtagtgatctggtcaatatgacgaccatctggcgttggccaggcgcgccactgtttaccatacactggcccgaggtcgccgttttcatcggcccattcgtcccagatggtgacattgttttcgtgtagataagcaatgttagtgtcgccctgcagaaaccacagcagttcatggatgatggaacgcaggtggcaacgtttagttgtcaccagcgggaatccatcttgcaggttaaaacgcatctgatgaccaaaaatggaaagcgttccggttccggtacggtcgtttttctgtgtgccttcgtcgagcactttttgcatcagttctaaatactgtttcatggttcctcaggaaacgtgttgctgtgggctgcgacgatatgcccagaccatcatgatcacacccgcgacaatcatcgggatggaaagaatttgccccatgctgatgtactgcacccaggcaccggtaaactgcgcgtcgggctggcggaaaaactcaacaatgatgcgaaacgcgccgtaaccaatcaggaacaaacctgagacagctcccattgggcgtggtttacgaatatacaggttgaggataataaacagcaccacaccttccagcagcagctcgtaaagctgtgatgggtggcgcggcagcacaccgtaagtgtcgaaaatggattgccactgcgggttggtttgcagcagcaaaatatcttctgtacgggagccagggaacagcatggcaaacgggaagttcgggtcaacgcggccccacaattcaccgttaataaagttgcccagacgcccggcaccaagaccaaacggaatgagtggtgcgataaaatcagagacctggaagaaggaacgtttagtacggcgggcgaagataatcatcaccacgataacgccaatcaggccgccgtggaaagacatgccgccgtcccagacacggaacagatacagcggatcggccataaactgcgggaaattgtagaacagaacataaccaatacgtcccccgaggaagacgccgaggaagcccgcatagagtaagttttcaacttcatttttggtccagccgctgcccggacgattcgcccgtcgtgttgccagccacattgcaaaaatgaaacccaccagatacatcaggccgtaccagtgaagcgccacgggtcctattgagaaaatgaccggatcaaactccggaaaatgcagatagctactggtcatctgtcaccacaagttcttgttatttcgctgaaagagaacagcgattgaaatgcgcgccgcaggtttcaggcgctccaaaggtgcgaataatagcacaaggggacctggctggttgccggataccgttaaaagatatgtatatgatccgcgctataaccctccgcgaatcagcccgcccatgccgcgacgctccataaaggctgcaacctgatggcgaacttcggtcgccagttgcgcttccagactacgctgcgcaagattttctgcttcggcataatcaatgcgccgcagcaggtattttgcccgcgctacagaacgtccgttcatagacagatggcgatacccaagcccaatgaggattgccacgcacatgggatcgcccgccatttcaccgcacaaacggagatcgattccatgtatttccgcttcccgggcgatcatcgccagagctcgtaacattgcaggatgaagactgtcataaatgttcgccacccgggtattgttgcgatcaacggccagaatgtattgagtcagatcgttggtgccaacagagatgaaatcgacccgctttgccagatgcggcagcataaataccattgacggcacttccagcatgatgccgatacgtggtttgggaatttcgtaaccgatcatctcctcgacttcacgtccggcacgttcaatcaggcggcgtgcttcatcaacttcatcgaggcttgtgaccatcggcaacagaatattcaggttgcccgtagcggcattagcacgcagcatcgcccgcacctggatcaagaagatctccggctgatcgagcgtaatgcgaatcccacgccaacccaggcatggattctcttcgctgatcggcatgtaaggcagctgcttatctgctccgacatccagcgtacgcaaggtgacgggtttatcattgaacatttgcagcatcccctgatactgcgccacctgttcttcttccgacgggaaaccactttgcagcatgaatgggatttcagtgcgataaagaccgatgccatcaatacggctgcccagtttttcttcatgttccgggcttaaaccagcattgagcatgacttttatacgctcaccgctttttaactgcgcgggtaaattgacgtcatcttccgccagacggctaagctcaatctcttcactaattagccgctgatattcttgcagcagtaccggctccggatcgaccagcaattcaccgcgatagccatcaacgatcagcgtcctacgatgcagcaccgaaggctgaatatccgcgcccatcacggtagggatccccagcgcacgtaccatgatcgcagcatgggagttggctgcgccatctcgcacgacaacaccgactaagcgatcctggggcagctcagcaagcgttgtcgctgacagttcatctgccaccagaatgaaacgttccggccaggcgttcggcccttgattagcgtcatcaagatgaaacagcaatcgctgacccagcgcacgtaaatcgccagcccgctctttgagatagttatcacttagcgcggcaaactgttcggcaaatttttcaatgaccgtttttaccgcccactctgccaccgagcctttatcaacctcggcaaacaattcgcgacgcagccgggtgtccgaaagcaggtgcgagtaaagatcgaaaatagccgccgtttctttttgtgcaccggcggcaaagcgtttgctgtagcggcgaaactcgtttgccgcttcttccagcgccccggtcagtcgttcgcgttccagagccggatccagcgttgatgcctgatacacctgttccattaaaggtaacgtggcatcctgccagccttcggcaatcgccacaccaggtgctgccggtaatgcgcggattcgcgtctggcgatattgcccaaacaaggcagtcaactgcgactgagaaagaatagctgccatctgggtggcaagcgtcaccaggaaggattcttcactttcgtcatactggcgcaactctcgttgctgtaccaccagtacaccaagcaactggcgacgttgaataattggtacgcctaaaaacgcgcggaaacgttcttcttttacggaggggatgtatttgaagctggggtgcttttgcgcatctgcaaggtttatcggttccgccagcctgccaaccaggccgacgatcccttcatcaaacgcgagcgttacagtgcgaccgcgtggttttttcagcccccgggtcgccatcaggtagtaacaacgtcgatcatgatcggccaggtagaccgaacagacctcggtatccatcgcaagacagatgtcggtaaccagaatatttaacgcctcattcaggcgtggtgcgctggctaccttttcgactatttcgcgcaggcgagtgagcataattggcgtgacttaacctcttttacgtcgataagcagatgcgttttgtggttttggcgtattttcctgcagtgacatcaccacactcgcgaactctttcattaccctacggtagacatcacgtttaaatgacaccacctgtctgaccggataccagtaacttacccatcgccagccgtcaaactctggtgtactgctggtttgcatattgatttctgcatcgccgctcaccagctgcaagagaaaccatttttgtttttggccgatacaaaccggcttcgtgtcccaacgcaccaaacgtttcggtaatttgtagcgcaaccagttacgcgttgaagcaaggattcgaacgtctttgcggcttaatcctacttcttcaaacaattcacggtacatcgcctgctctgcggattctccggggttgattccgccttgcggaaattgccaggagtgctgaccaaatcgccgggcccacattacctgcccctggcgattacaaatcacgatacctacgtttgggcggtagccatcgtcatcaatcaccggactacctcaaaataaagctttatatacgaatgattgtttcatactccaggaagacggtaaaccactctctgcagggcattacacactaataacaattgaataactcacagttatgtgcagagttataaacagaggaaggggtggatagccgtttttattcaccttttctgtggatagagttgtgaagaactacggaattactacgggaaaacccggagcattctgaataagcccgatatagacattttaaaatattcattatcagtcaatgcattacatgtaattttagtaatgaaaaagagtaattcgtgacccaggtcacacctctcatttacgggttggcgaaagatcaaccaatgccgtatttatccacagaatgtgccactaagttaagcactgaaccactaaaaactggagtttcgtcgcacgtcaaggctgtaaatggaaacagtagtggaggtttttcacagttatcccagctttctgtggataacatggtgtaagatcctgtttattttcagtgaccagatttggaaaacccgttgcagtgttgcgcaactcgattaccggcaacctaaaaagcaatataaatcagagaattgaacaacgcatgtggaaaaagttacactgcgaatattcggcacataattgctgtttgttttttaatcaaggtatcatgacatgtcccaacctcgcccactgctctctcctcccgaaactgaagaacagttgttagcgcaagcacagcaactttctggttatacattgggagaactggcggcacttgtcgggctggttacgccagagaatttaaaacgcgataaaggctggattggcgtgttactggagatctggctaggtgccagcgcagggagtaaacctgagcaagattttgctgctctgggcgtggaacttaaaactatccctgtggatagtcttggtcgtccgctggaaacaacattcgtttgtgttgccccgttaacgggcaatagcggggtgacctgggaaaccagccacgtgcgccacaaactcaaacgcgtactgtggataccggttgaaggcgagcgcagcatcccgctggcgcagcgtcgcgttggatcaccgttgctgtggagcccgaatgaagaggaagaccggcagctacgcgaagactgggaagaattaatggatatgattgttctcggtcaggttgagcggattaccgctcgtcacggggagtatttacagatacgaccgaaagcagcgaatgcgaaagcgcttaccgaagccattggtgcccggggcgaacggattctgacgctgccacgcggcttttatttgaagaagaatttcaccagtgcactactggcccgtcattttctgatccagtagccatcgctttgacctgccgctttccgggcatataattaccgcttcatttttttggcagggctttttagatgttatttgcatggataaccgatcctaacgcctggcttgcgctcggtacgctgacgctgctggagatcgttcttgggatcgacaatattattttcctttctctggtggtggcaaagcttcccacagcacaacgtgctcatgcgcgccgtctggggttggcgggagccatggttatgcgtctggcgctgctggcatcaatcgcctgggttacgcgcctgacaaatccgctttttacaatattcagtcaggaaatttctgcccgtgatttgattctgcttctgggtggcttgttccttatctggaaagccagcaaggaaatccacgaatccattgaaggtgaagaagaagggctgaaaacacgcgtttcatcattcctcggcgctatcgtgcagattatgctgctggatattatctttagcctcgactcggtgattacggctgtgggtctgtcagatcacctgtttattatgatggcagccgtggtgattgccgtaggcgtgatgatgttcgccgcgcgctcgattggtgattttgtcgaacgccatccttcggtaaaaatgctggcgctctctttcctgattctggtgggctttaccctgattctggaaagtttcgacatccacgtaccgaaaggttacatctacttcgcgatgttcttctctattgcggttgaaagcctcaacttgattcgcaacaaaaagaatccgctctgatactccgtacgctctcctgcgggagggcgtactcactccttttaccctcacagtttaagattttcctgctttcaagatatataacgtcggtttataaacagactattatcataggtaggccaaatgaggataaccggatgaaaaaatgggcagtaataatttctgcagtcggactggcgtttgctgtttccgggtgttccagtgattacgtcatggcgaccaaagatggccgtatgattttgaccgatggaaaacctgaaattgatgatgataccgggctggtgagttatcacgatcagcaaggtaacgcgatgcaaattaaccgtgatgatgtttcgcaaattattgaacgttaacaaataaggtcagcatccggctggccttaagatttttctctttcccttttcccttccctctgccatttttatattccttatgtcgtgattataaaaaggaaacggctatgcaatatcaccgtataccccacagttcgctggaagtcagcacgctggggcttggcacgatgacgtttggtgaacagaacagcgaagccgacgcccacgcacaactcgactatgccgtcgctcagggcattaaccttatcgacgttgccgaaatgtacccagtacctccgcgccccgaaacgcaagggttaaccgaaacctacgtcggcaactggctggcgaaacatggcagccgcgaaaagttaattatcgcctccaaagtgagcggaccgtcgcgcaataatgacaagggcatccgcccggatcaggcgctggatcggaagaatatccgcgaagcgctgcatgacagcctcaagcgcctacagactgattacctcgatctttatcaggtgcactggccgcagcgcccgaccaactgcttcggcaaactcggttatagctggacggattctgcgcctgcggtttcgctgctggatacgctggacgcactggcagagtaccaacgcgcgggaaaaattcgttatatcggcgtgtcgaacgaaactgcatttggcgtaatgcgctacctgcatctggcggacaaacacgatctgccgcgtattgtcaccattcagaacccttacagtctgttaaaccgcagttttgaagtaggtctggcagaagtcagccagtatgaaggggtcgaactgctggcctattcgtgcctgggtttcggcacgctgaccgggaaatatctcaatggtgcaaaacccgctggcgcacgtaatacgctctttagtcggttcacccgctatagcggtgagcaaacgcaaaaagccgtcgcggcgtatgttgatatcgccagacgtcatggcctggaccctgctcagatggcgctcgcgtttgtacgccgtcaaccgtttgttgccagcactctgctgggcgcaaccacgatggatcagctgaaaactaacatcgaaagtttgcatctggagttaagcgaagacgtattagctgaaattgaagcggtgcatcaggtttatacttatccggcaccataagattaacgccggttaaaaccggcgttaaatattaatgacggcgctgccagatccacagcgccgttattgccagcgcaaacagcgcaccgaagccaatgccaatgggcacgaccgggatgcctatcattaccgccagcgagtaaatgcccagcatcaacaacatggcgctgttttcgccaaggttttgtactgcaatcgcattccccgccccgacgctttttttaccccgctcctgtagcaacgcattgagcggaacgacaaaaaagccccccatcacgccaatcagcatcaacaaggcataggctggcagcagctcgtgttgcagggaaaaaatcagtaccaccacgccaatcaaaatcccggctggcatacagcgtgacacggtttccagcgtaactaacttcgctgccgcacctgcgccaaccacgataccaatcgctaccatcgcgttgagataggtgggcgtagcgttatcggtaatgcccagcgccaccggtacccacagcaccaacaggaaacgcagcgtgacacccgctccccagaataaactggtgcccaccagcgaaaaacgcgtttcaccattgcgccatagcgaggtgcaggcattcaggaaactgcgggtcatgttgatgagattccaggactgccccggacgcgccgccgccagtttgggaatgtagatattggcaacgaccgcaccaccgtaggccagtgcgcatgcggccagggcgacgaggacatgccagtcagccagcacaccaccggctacggaaccgagcaaaatcgccgctatggtagaagcttccattaaaccgttagctttcactaacttactacccgtggttaattcgccgagaataccgtatttcgccggtgaataggctgcagcaccaacacccaccagcgtatagccgagaaacggattgataccaaagcagatactggctgcgcccagcagcttcaggccgttggcaaacatcatcacccggcctttggcgaagctatccgccacctgcccgacaaacggcgcaaaaagaatgtaagcacctacaaacaccatttgcaggatgggctggctccactccggatagaactgcgctttcagtaacgccagagtggcaaacagtagggcattatcgccaaacgcagagagaaactgcgccacgataaccgctttcatccccttcgaccacaacgaagtgttagtgtgcactgactcactcatcgtgttgttccgcttcgtctacccagcttttcaacgtgacaaagtcaggtttgccgctgccaagtaatggcatctgtttcagatagcgaatatcgcgcggtacagcaagctccggcacgccgtgctcgcgggcatactgttgcaacttatcgcgcgtcagttcgttatctgtggtgaaaagcaccagtgcctcgcctttgctggcatcgctcttaatcgcagtggcatggactttatctggcgaaacaccaagtgccagttgttccaccatttccagcgacaccatttcgcctgcaattttggcaaagcgttttgcgcggccctgaatctgcacaaagccctgctcgtcaaaacgcacaatatcgccagtgtcataccagccgcgctccatttcgccgcgaacattctcggcggtgggcacttccagtacacctggcttctccacccgcagatagccgttcattatgttcggccctttcagttgcaggcgtccgccctcttcgataccagggaccgacaacaggcgcgcatccattcctggtagaatacgccctaccgtaccgggtttcgccgccatcggtacgttgatagaaacgacaggcgcgcattcggtcacgccgtagccttcaaggatgcgcaggccaaatttatcctgccaaagctgtttggtactttcttgtaatttttctgcgcctgccaccacatagcgtagacgatagaagtcatacgggttggcgaaacgcgcgtagtgaccgaggaaagtcgaggtgccgaacaacacggtgcaactgcggtcatacaccaactccggcacaatgcggtaatgcagcgggcttggataaaggaacacttctgcacctgtaagcagtggcgtaaacaggcctaccgtcagcccaaaggagtgaaacagcggtaacgccgacataaagcgatcgttggtggtgaagtcggcaatcgttttaatctgctcgacattcgccagaatgcttttatggctatggacgacgcctttcggatggccttcagaaccggaggtaaaaaggatcagcgcctcttcttccggctgctgtttaacctgtgccagacgcggcatcagcaaatgagcgaagatccatactttgtcggcagtggtgacatctgcttttaaatcttccagatagacccagcgcacctgagtaagttgctccggcagatgccagagtttgcctttatcgagaaactggcgggaagtgaagatggttttgatttcagccgccgtaatagcactggtcagcccttttaccccggcagtgtagttcatcattgcgggcatgcggcgacgggcgatggccccaaaaatcactgccgcactgatgcctgcattgggcagcattaagccgatgcgttcgccttcaacactgtatttttcaaggatgcgtccaacaaacagcgttttcgtaagcaatttgcgataggagtctggggtaaagttgacgtcttcgacacatttcttcccggctccgaagcggtacattgcactcagtaaagattcgtacagcgtttcacgcgggcgcaccgccattcgcgcttccatcattatttgatgcagcatttcgccagcgattttgcgacggtcacgggcacgcggcgcatccggcatcgccacctgcgttggtggcaaaatatgcagagtaatttgcgggaacaagcgacgtttaaccagacctttcaggcggctgaagtgcgtaagttccgccccttcaatacgcacaggaataaccgttgcaccagacttcgccgcgacaaaacccgcgccatcgtagattttcatcagcgagcctgtcgtggtgatgcgtccttcagggaaaatcaccactggtcggccctgttccaccagacgtaccagatgtttaatagccataggttgcgtcgggtcgagaggaacaaagtcgataaatgatttcagccaacgcatataccactgttggcttattgaggtgtaaacggcaaacactggacgcacaggtaaaaacagtccaagcaaaatgccatcaataaaagagacgtgattaggcgtaattagaacgcgctcgcccttcagtgcctgggtgtcacccgtaacgcgaacgcgatacaaaacacggcacaaatttcgaaaaaagctaaaaagcattccaactccctttgctctgattcagtaaaagcgaatggagggagattacacgagataaagaacgcgagcgacagtaaattaggtgcgaaaaaaaacctgcgcatccgcgcaggttggtgcaagagacagggtacgaagagcgtaccgaataatctcaccaatcaatacctctgggatcttgattgtggtctgcacgacgactcttcgccagcgagaaaacgcaaaggaatgaagggaaatgcaacgaggtgtgtaaattgtcggttactgttacagattgatgaccggcaaaaaaaacctgcgcatctgcgcaggctggtgtaattcatgtgctcaacccgaagttgacttcacctatcaatacctctgggatcaccactttagcaacctgaagccaaacgccaccagcggtcaatcgcaacagcgtttcgcaaagtgtaaccaaaggtttgcaatctctttttttgtcttacttatttgcgtttggctcacattcccacgatgaaaacacgccaccccttgaaccaacgggcgttttccgtaacactgaaagaatgtaagcgtttacccactaaggtattttcatggcgaccataaaggatgtagcccgactggcaggcgtttcagtcgccaccgtttcccgcgtcattaataattcacccaaagccagcgaagcttcccggctggctgtgcatagtgcaatggagtctcttagctatcacccgaacgccaacgcccgtgcgctggcgcagcagaccactgaaacggtcggtctggtcgttggtgatgtttccgatccgtttttcggtgcaatggtgaaagcggtcgaacaggtggcttatcacaccggtaattttttattgattggcaacggttaccacaacgaacaaaaagagcgtcaggccattgagcaactgatccgccatcgctgtgctgcgttggtcgtccatgccaaaatgatcccggatgctgatttagcctcattaatgaaacaaatgcccggtatggtgctgatcaaccgtatcctgcctggctttgaaaaccgttgtattgctctggacgatcgttacggtgcctggctggcaacgcgtcatttaattcagcaaggtcatacccgcattggttatctgtgctctaaccactctatttctgacgccgaagatcgtctgcaagggtattacgatgcccttgctgaaagtggtattgcggccaatgaccggctggtgacatttggcgaaccagacgaaagcggcggcgaacaggcaatgaccgagcttttgggacgaggaagaaatttcactgcggtagcctgttataacgattcaatggcggcgggtgcgatgggcgttctcaatgataatggtattgatgtaccgggtgagatttcgttaattggctttgatgatgtgctggtgtcacgctatgtgcgtccgcgcctgaccaccgtgcgttacccaatcgtgacgatggcgacccaggctgccgaactggctttggcgctggcggataatcgccctctcccggaaatcactaatgtctttagtccgacgctggtacgtcgtcattcagtgtcaactccgtcgctggaggcaagtcatcatgcaaccagcgactaaccgcagttaaagcaattccagcgccagtaattcttcgatggtctggcgacggcgaatcaaccgcgcctgaccattatcaaacagaacttctggtaacagcggacggctattgtagttggatgacattgatgcgccatatgcccctgtatcatgcagtaccagataatcacctgccttcacttccggcaaggcgcgggtttcaacatttcccccttcctgctgggtaaagacatcgcccgattcacataacggtccggcgacgacggtttccaccgttggcgcgtgttccagagaacgaccatcagctgccagggcactgatatggtggtaactaccgtacattgccgggcgcatcagatcgttgaacccggcatcaaccagcacaaagtggcggctccccatttgtttgacgctccgcacctgagtaattaatacgccagactgcgctaccaggaagcgacccggttcaatttccagtttcacagggtggcccaaatggcgggcgatttgctcacgcgcggcattccacagaccataataatgttcggtatcaaccgcctcttcaccctgttgataaggaacagaaagcccaccgcccgcagaaatagcctgtaaatcctgaccgaattcgatgacctgacgcaccatagcaccacacacctgttccagatgggcataatcaacgccagaaccaatgtgcatgtgaatgccgaccagctgcagatgatgacgttgtatcacgtccagtgcggcgggcagatcggtgtaccagataccgtgcttgctgttttcgccaccggtattggttttttggctatgtccgtgaccaaaccccggattaacgcgcagccatacccgatgccctggcgaaacctggcccagttggtcgagcatatcaacagaacccgcattcaccggaatttgcaattcactgacgcgttcaagcgtcgcctgatcgataacatctgccgtaaaaacaatatcatcggggtgcgtttgcggattgtaacccgccgccaacgcacgctctatttcgcctaacgagacggaatccactttcacgccctgctcacgcattaagcgcaaaatatgaatattggaacaggctttctgtgcaaagcgcaccacatcaaactgtttcagcgctgcaatctgccgacgaataatttgcgcatcgtagacccacaccgggcagccaaattcagcgggcaaacgcagcagattttcggcggtgagatcggtatcggtgctgaacagtgaatgtggcataacaaactccagataagtgcttttttatgattacgccacatcataaaaagaataaaaaatatcgatttatgtcgagtctatgcaaaaatgatatggattaccggattgcgagagagcgctaatggccgccgttaacttacgtcatattgaaatttttcatgcggtaatgaccgccggaagcctgactgaggcggcacacctgctacacacctcacagccaaccgtcagccgcgaacttgcgcgctttgagaaggtgatcgggctgaaattgtttgagcgcgtacgtgggcgattacatcctaccgtgcaaggactgcgtctgtttgaagaagtgcaacgatcctggtacggactggatcgcattgtcagcgccgcagaaagtctgcgcgagtttcgccagggagaactgtctattgcctgcctgccggtcttttcgcaatcttttttaccgcagctcctgcaaccctttctggcacgttatcccgatgtcagcttaaatatcgtgccccaggaatcaccgctacttgaagagtggctctcggcccagcgtcatgatttaggactcactgaaacgctccatacgcctgcgggaacagaacgtaccgaattactctctttagatgaagtgtgtgtgttacctccgggtcatccgctggcggtaaaaaaggtattaacgccggatgattttcagggtgagaactacatcagcctttcccgtactgacagctatcgccagttgctggatcagctatttactgaacatcaggttaaacgacgcatgatcgtagaaacccacagcgccgcgtcagtctgcgcaatggtacgggcgggggtaggtatttcggtggttaacccgctcaccgcactagattatgcggcaagcggtttagtggtgcggcggttcagtattgcggttccgttcaccgtcagcctgatccgccccctgcaccgcccgtcatcagcgctggttcaggcgtttagtgggcatttacaagcggggttaccgaaactggtcacttctcttgacgctattttgtcgtcagctacgacagcataaaagcgacagcatcctcggcatggatcgccgcggtatcaaacacaggcaaaacactgcgctcttctggcaccagtaaaccaatttctgtgcagccaaaaatgacgccctgtgcgccctgttctgcaaggcgagcaatcacttgcgcacaataagcgcgtgacgcttcggtaaattgccccagacacagttcttcaaaaataatctgattaattttcgcccgttcatccgcttcaggaataagacaattgatggaaaattgttccgtcagccgcccgcgataaaaatcctgttccatggtgtaacgcgtacccagcagcgccacacgagtcattccggccccggtaattgcacgtccggtggcatccgcaatgtgtaagaaaggcagagtgcaacgtgactcaatggcatccgccactttatgcatcgtattggtacatagcacaataccttctgcgcccgcccgctgtaagccaagcgccgcctcagccagaatgtccccggttttatcccattccccgcgacgctggcactcttctatttcatgaaaatcgacgctatgtagcagcacttgcgcagagtgaagcccaccaagccgctgtttaatgccttcatttatcaaacgatagtaaggaatggtggattcccagctcattcctcccagcaaaccaattgttttcattcctctctcctgatgtgtgttaccgcaacaaggctgaataaggaacgagacaaacgcctcaacggccaagtgcccaatctctattaacgaaaaaagggccggatgtacagcacatccggcccgtgaaatcagacgccgatatttctcaacttctcgcctgccatcagtttgcgttcgatatgttccagcgtgacatttttggtttccggaatgagccagaaagtaatgcccacaaacgcaatgttcagcgcagtgtagagccagaacgtaccggcagcgccaatgctatcaagcagtgtcaggaaggtcgcgccgataatcatattcgacacccagttcgtggtggtcgaacaggtaataccgaaatcgcggcatttcagcggctgaatttcagagcacaggatccacaccactggcgcggcgctcatcgcataaccggcaatacacatcatcgtcatgccaacagagagccaggacaagccactggaagccgtaccgttatcaaactgcatcaggcaatagcccagcaccagagtgcctaacgccatcacgctgaaaccaattttcagagccggtttacgccctgctttatctaccgtaaacaccgcaataaaggtggcgaacataaaggtcagccctacgaccagagtcgcaatcatctgttgttctgtggtcgtaaagcccgccattttgaagatacgcggcgcgtagtacatgatgatgttcataccggtaaactgctgcatcgcctgcaacaacataccgagaaacacagcacgacggacgttacggttgatcttaaacagtgcccaaccgccctgttttaacttcaggctttcacgaatttcgttgagttcttctcgcgctttttccgacgtatcgcgcagcatacgcaatacttcttccgcctcaatatgacgccccttttccgccagccagcgcgggctatttggcaggaagactaccagaataatcagcagaactgctggtaaagcaagaacccccaacattgcgcgccagttaccgctataactgaacgctgtatcggataaaaacgccagcacgatgccgagtgtgaccatcaactggtacatactgatcatcttaccgcgaacgttttcacttgccatttcagaaagatacagaggagcggtgtaagacgcgatcccgacagcaatgcccagcaccacacgagcggcgattaacatctctacgctggtcgcaaaagcggaccctatagaaccgagtacaaacaggatggcccccgccatcaggctgtatttacgccccaggcggaacgacagccaaccattaaacagcgcaccaattgctgcaccgagcatcatgctactaaccacccattcctgcaaacgactggtcagcacaaagtgatcggtaatgaacggcaacgctccggcgattacgccgatatcaagaccaaataacaatcctgcgaccgcagcagctaccgaaacaaacatattcatacgccgcgtatcccgcaaagaacgtggcgttaaagcagattccgtattgatagtaaccattttttcctgccagcagagagtaagacatagtgaaaaaatacgtgaacaactcacgcaggtgtcaggtcggaaacagcataaatatggattaaattgctgcgacatgtcgttatgtgatggatattccaattttcaaattaagttgaattattgagattattattaaccacctaattttacagcagataaaattcataaagttcattaattgataattaatatggattatttcataaccatgatatggattatgatgatctacaggtataaaaaaccctgccatgcggcagggtcataaaagtaagaagaatgaattaacgcgccagccaaccgccatccacggcaatggtataaccattcacataatctgaagcgctggaggcaaggaacactatcggccccatcaggtcactcggcagtccccaacgaccagctggaatgcggtcgagaatttccgcgctacgttgttcatctgcccgtagttgttgagtattgttggtcgccatgtaacccggggctatcgcattaacattaatgttgtgtttagcccattcgttcgccatcaatcgcgtcacacccatcacgccgctttttgatgcggtataagaaggcacacggatcccgccctggaaggagagcattgacgcgatattgataatcttgccgccattgccttgcgcgataaagtgtttcgccgctgcctgagacatgaagaatacgctcttgatattcaggttcatgacatcgtcccagtccttttcgctgaactcgagagcatcttcgcggcgaatcaatccggcgttattcaccaggatatcaatatgaccaaactccgctaccgcgcgatccagcagtgctggaataccatcaatctttcgcagatcggcggtcaggcttaaaaaacgacgccccagcgctgtgacctgctcgatggtttcagtcggttcaacgatgttaatgccaacaatgtcacagcccgcttgcgccagccccaacgccatcccctgacccagtccagtatcacaaccagtgacgaccgcaactttaccttcgagagaaaatgcacttaaaatcataacaataccttattcgtttatgcccacaactagcgcaaatctttaacggccacatggtccatatcatcaaagacctggttttcaccgaccatgccccagataaaggtataagctttggttccgacaccggaatggatcgaccagctcggggagatcaccgcctgctcgttatgcatcacaatatgacgcgtttcttgcggctgccccatcatgtggaaaacgcaggcgtcatcatccatattgaaatagaaataaacttccatccggcgctcgtgggtgtgacacggcatggtgttccacaagttacccggagccagctccgtcagccccatactcaattggcaggtttccagtacatccgggacaaaatatttgttaatcgtgcgacggttactggtgaggttatcgcctaacgtgactggagatacttcgtccggtgtgacttttttggtgggatacgtcgtatgcgcgggtgcgcaattgtaataaaacttcgccggagtgccggtatcaatactggcaaagacaacttcttttgcacctttaccaacatacagggcgtcgcggtgaccgatttcatagcattggccatcgacagtaatcgtaccggcaccgccaatattgataacacctaactcgcgacgttcaaggaaatagcttacgccgagttgtttaccaacttccccgccaacggaaaccgttttagttatcggcataatgccgccaacaataattcggtcaatgtggctgtaaaccatggtgtactcatcggcgacaaataccttttcaaccaaaaattcattgcgcagcccttgggtatccagcgtttttgcgtgcgcactgtggatgctctgtcttacgtccacatcaacctccgataatcagtgaagcgtgaaaatagaaaacgatagtgaaacactgtttcgttttctctataaagggatgatatgcccatgggctagggttttcaattaaaaataaaacaatgcttcatttttaagttaaggattaaaaaaagtgcagtgtcgatcacgaatatgtcatgagaatggaaaaatgagggagcccagaaaatgtatgtcgacttgccagccatcattattcaacagattaatgacggcagatatttatcggtaaggaggaaatgcagagctattcgtcacgttcaatggtcaatgccacaccctggcccccgccgatacaaagcgttgccagtcctttgcgggcattacgtttcaccatttcatgaaccagagaaaccaggattcggcaaccggaagcgcctatcgggtgaccgagtgcgatcgcgccaccattgacattgacccgacgctcatcccactcaagcatcttgccaaccgaaagcgcctgtgcagcaaacgcttcattagcctcgataagatcgacttcagccaactgccagcctacacgctccaggcaacggcgggtcgcatacaccggcgcaattcccatcaatgccggatctacaccaacgctggcaaatgcgcgaatgcgggccagcacgggtaaattcaacgctcgtgctttggcttcgctcatcatcattaccgcagctgcgccatcgtttatggatgatgcattacccgctgtcacagaaccgagactatcaaatgaaggatttaaacgggctaagccttctgcgctggcgtcagtgcgtggctgttcatcggtatcaacaaccaacgtctgcccgttactttgggtcattaccgggacgatctcatctttaaatcgtccggcgtcaatcgccgctcgcgctttttgttgcgagctaagtgcgtaagcatcctgcaactgacggctgatgccatattcgcgagccagattttcggcggtgacaccaatatgataatcattgaaggcatcccacaacccatcatgcacaagactgtcaaccaactggctattgccaagctgtgcaccggtgcggctatcagtcagaacatgtggtgcgcggctcatgttttcctggccaccggcgatgacaatatcagcctcgccacactgtatcgcctgagtagccagatgcagtgctttaagcccggaaccgcaaacgtcattaatagtgattgcagaaacgctattaggcagaccacctttaatagccgattgccttgccggattctgccctgcccctgcagtcaacacctgaccaagaattacttcatccaccgcatatgcaggaacgccggtacgttctattaacgctttcacgaccagactaccaagttccacggcggaatgacccgctaacgcaccacgaaagcagccgataggtgtccgtaacgccccgacaatcacaacgtctttcatcacaacctcgcaccaattaacagtgcaatagtaaatgattgttaattacagttatcttaattgtttaaaaaaagtgatttttatcacaaaggaaatatgcctgagcagcagtcagagacataactggcacgtaaggtttgcaaccactaacccaccaatagaggggtagatagggcgttaatctcccatacttaacctggtttatggtaaattgccctccattttgtttaatttgtagatgatacgttcagataatgtctaatatttggtctaaagaagaaactctgtggagtttcgcgctctacggcacagccgttggtgcaggcacgctcttccttcctattcagttaggttcggcaggggctgtggtcctgtttattactgctctggtcgcctggcctttaacatattggccacataaagccttgtgccagttcatcctctcatcaaaaacatcagcaggtgaagggataacgggcgcggtaacacactactatggcaagaagattggtaatctgattaccacgctgtacttcatcgccttttttgtcgtcgtgttgatatatgcagtggcaattaccaactcacttacggaacagctggcaaagcatatggttattgatcttcgcatccgtatgttggtgagtctgggtgttgtattaattctgaatctcatttttctgatgggacgtcatgccactattcgggtaatgggatttttggtattcccattgattgcctatttcttatttctttccatttaccttgtcggtagttggcaacctgatctattaacaacccaggtagagttcaatcagaatacccttcaccagatatggatatcgattcccgtgatggttttcgcctttagccatacgcccattatttctacgtttgccatagacagacgtgaaaaatatggcgaacacgctatggataaatgcaaaaaaattatgaaagtcgcttatctcatcatctgcataagtgtactgttctttgtctttagctgcctgctttctattccaccttcgtatattgaagctgctaaagaagaaggggtcaccattttatcggcgctttctatgctgccgaacgccccagcatggttgtcaatttccgggattattgtcgcagtagttgcgatgtcgaaatcattcctgggtacgtactttggcgttattgaaggtgccacagaggtcgtcaaaacaacactacagcaggttggtgtaaagaaaagtcgtgcatttaaccgcgcactatcaattatgttggtatcgctgattaccttcattgtttgttgcattaacccgaacgcgatttcgatgatttacgcgatcagcggcccgctcattgccatgatacttttcatcatgcctacgctgtcaacgtatctcatcccggcgcttaaaccctggcgttccatcggaaatctgattacgctgatcgtgggtatcctgtgcgtatcggtaatgttctttagctaatatcagttgtggatggttcaaaattgctacaattttgaaccattccatttttcataatattcatttgttattattccaccctatcacttctctcgtcatatcctagtattatcagttagttaaacacacaaagagatctgaacatcttaaataagactatttaagatgcataacttagattcgcaagatatcttctggtcattcaaaaacaatttgcgatatagatattcttataccatgagatagttatctggaccgctctcaaccatgcaagattaaatcagtgaaacataatcatatttgataacgagaaatgcatttttaaatgccttactcagaattatagcaaatacagattaatcgcaatttttcccggcaaaattacaaaatcatggtgtattgacatcatcaataaccaatgaaattatgcaattatatacggatagggaggttcttaacatggggctttgtagtcgttataaaagtcttacatgcaatagttgctcaatgcattgccaaataatgccagaagagtcaccgcgtttgcagtattgcgcaaactcgtgtttttgtatgtggcccgaagaaagttcatattttaatcgtggtgtggtagaaggtatcttaacaaaaaaccacaatgcgagattaagcggatatatttttgtcgatttttcagtaagttttttacgtctattccttgaaaaagactggattgactatcttgcaagtactgacatggggattgttttagtcagcgaccgcaatatgcaatcgttagctaattactggcgaaaacacaactcagcaatatctgctgtcatatataatgatgatggtcttgatgttgccaatgaaaagatcagacaactatttattggtcgttatttatcatttaccggaggtaacacattaactcagatggaattcaccataatggggtatatggtttctggttataatccatatcagattgctgaagttctggatatggatatccgtagcatctacgcgtacaagcaacgaatcgaaaagagaatgggtggtaaaataaacgaattatttattcgttcacattcggtccaacattgatactcaacgaccagccagaatcatactctgtttatacgggcatttattgaaatgtccgtattttataaataggccgtcccctcaagagtaaacaccatagtatttaaaaccatcacacgaaaaattcagaagcattacgaaatatgaatttacaaacaatagtggcataaatgttaaccatgttaatttacgtaaagttttacgttgcaacattaaagcctcatttcaatcatcatgataaatataaaattaatatatatttatgccgtaaataccaatatacttagcaaactatgtgatctccatttcgattgatttagtgtttattgacgtatgtactggattattaacgataatatcgagttctggcctgagcaccgaaaattaatatcggtacataacgccgatcttaacgtcgttctgacaacgccagccagtcgatgtttatcacttctacttgaagcttttcctgatgtggttgcacaacaagattttttcaccagagtctgggaagaagaaggtatgcgtgtgcctactaacacgttatatcagaacatatccattatcagacgcggatttcgcgctgttggtgatactacccactcgctaattgcaaccgtgccgagaagaggattcaagatccataatgacattaacatacaaaatcatgtaataaactcgtcaacagacgcacatacacacaatgccccacctgccataaaagttaatgcgggatacaaagagagcattggtggcgcaaagaatttcaataacaaaatcctcaaacatataaaaagtcatctaattatgttgagcgcatttgtcataggcgcatattctgcatattggctatggaataataatcaaccgaagccatttttcaaggattacaagactgttgcggaaattaatggctgccattttaatgtaacagaagatacaattgatgggttgaaagagttcgataaatataaaacacggatactggattcggggattaactgtaaaaaacatccgtggttatacttccctcttgcaaaatcctcaccggggatgattgttatggcatgcaataaaaactataaccaacatgaagtggcaaactgtttaaccctgtcttaccgtgaggttaatcgtgattgattataaaaaaaacttattatttattttagtttttatcagtgggtttattctcttcactgtctattcttacactgcagaaaaaatgatatataacgaaacatgcactgcaaattgggtaatttttaatgaccagggacgagcaaatcttaccatcgactttatgtataacaaaaaaaataaaacaggaactgttgcgttgagtggaacctggcaacaaggtaacagagaaagtaaatcaatacggcgaaatattgaatacacatggattgaaaactatgacacagcccatttaacatcaaagaaagttaataagtttgagattatggatcaagttgatgatgatagacttgcacaacttattcctgatttttatgtctttccagaaaaaagtgtaagctataatatactaaagcaaggtaagcatgcttttattttgagcattggtaacagagcaataatgcattgtgcaaggtaaactaaaatagataacaaaaagatggaacctcgttaatcataaaacaataaaattaaatattctcgcagtatatggcagtctaaagcatcaaagatttgatcaacatctttcattttagacatctccttgcaatgtaaaatatcatgtatcaacaacatctggtgcaaatccatgagtcgaactcgacattcatcttagctcgattattattccttcgtacagtcgatgtaaacaatacagaaagaggattattaagaaccagtttactcagtgaatcaatagaggaaaggactaacgtttctttaaaagaattgatttcatcatctgttaaactaaactcatcattgacagatcgtgagatataactgtttttaactttactctttacgttgactttattgacagaattaacattcacatatcttgaatttaatgtccatgatgttgtttgcgtgagaacattctcagcattaaggaatttttttaacggaatccttggtttctttttcgagtccgaatttacaatatcatgcatatagaccatttcatgaatctgcgaaaattcaatgtccattgtatacctcacatttttaccgtgactcgatgttactgttcaataatcaccttccatcaatactaaaattaatacccctaatgtgccgataacaaatatagtcattctacgtaacgtctccataaggtgatatttgacattatcagaagctgcgaattcggattttgctctaatcaaatgagagaaatgtaaaatgaagccacgaaatattaataatagcctaccactgcaaccattagttcctgatcaggagaacaaaaataagaaaaatgaagagaaatccgttaatccagttaaaatcacaatggggtctggtttaaattatattgaacaagaatctcttggaggaaaatatctaacacatgatttgtcaataaagatagcggatatttctgaagagataattcagcaagcaatattatctgctatgagcatatataaattttcgataacagatgatttaatgagtatggctgtaaatgaactcataaaactgaccaaaatagagaataatgtagacctgaataaattcactactatatgcacagacgttctatccccccgcgtcaccagacataataaagaaaaaaacaaacgacattctacccttctcaaaaatcccctttttaattttcattgaaaaaatggcaattgatactatgaatccaggtcatacacattaaggcatttatgtaatgtcgtaattaagataactaataaggtgaatattagtaaaacaactaatgatgttattagtttgtagtgaacagtacttttaccaataatgaaaaatataccataagcaatgcaagcttaaaactcataatttaaaaaagataaatataaaaatatcaatgagtcaatcaataataatttggcatcacgagacacatcacagaggaatattatgagcacagaaacaattgaaatattcaataatagtgatgaatgggcaaatcaactaaaacacgcattatcgaaaggagaaaatctggcattactacatggtttaactcctgatatccttgatagaatatatgcatatgcattcgactaccatgaaaagggtaatataacggacgcagaaatttattataaattcttgtgcatttatgcgttcgaaaatcatgagtatctaaaagattttgcatcagtatgtcagcccaaaaagaaatatcaacaagcatatgacctttacaaactaagttacaattacttcccgtatgatgactattcagttatttatcgtatgggtcaatgtcagattggggctaaaaatatcgataacgcaatgcaatgtttctatcacattattaacaattgtgaggatgatagtgttaagagtaaagcgcaggcatatattgaactcttaaacgataattcagaagataatggctaagcattacaatcatttggttaaatttgctggttatagtgcagttaaccactataaccagcacctcttatgttttcttaaatcagcatcttaaaacagttaagagcatactataaatcattatttttcaatgcgttagagaacaatctactttatcaaaattgaataaggctatttcagattacatcactgaattcctaagataaattagtgaacacaaccatagatatgtcaaatgtaatttcctgtagcgttaatgacacataaatatgaatagccataatttctattgcttaagcaggatgcaagaaaccaattttttcatagaggttaactaatggacttagaaaataaattctcatatcattttcttgagggattaacgctcacggaagatggaattcttactcaaggaaatgagcaagtttatattccacagaaagagttaggtgtattaatagtattacttgaatccgctggtcatgttgtactgaaagatatgatcatcgaatcagtatggaaaaatattattgttagtgacgagtccctgacaagatgtatctattctttgcgctgcatttttgaaaaaattggctatgatcgttgcatagaaacaatctaccggaaaggttatcgtttcagcgggcaggttttcaaaactaaaattaatgaagataatacttcagactattccatagctatattccctttcactacttcattgaatacactggatccattaatacttaatcaggaattagtgcaaatcatttcaaataaaaaaatcgatggtctctatacctatccgatggctgcgacaaatttttgtaatgatcacatatctcaaaattcattcttgagcagattcaagccagattatttcgttacaggaagaataaaccagaataatgcagtgaacactttatacattgagttgatcgacgctaaaaaccttttcctcatcgccagtaatcatctccctgttgatgaactacataatacatcacaatttattatagataatatccttcaaacggtacataaaccagaacgatctgtaagattagctaagcaggaccaaggatataagaatcattatttatcagatgaaatgttagccggaaagaaagaactttacgacttcacccctgaaagcatttacagggccatgactatatttgatagattacaaaataaaagtgatatacagacgctaaaaacagaatgttattgccttctagcggaatgccatatgtctttggcacttcatggaaaaagtgaacttgaacttgctgctcaaaaagcattagagcttttagattatgtatcagacataaccactgtcgatggaaaaattttagctattatgggactgataactggtctgtctggacaagcaaaagtatctcatatcttatttgaacaggctaagatacactcaactgatatagcctctctctactactatagggcactagtccactttcataatgaaaaaattgaagaggcaaggatttgtatagacaaatcactacaactcgaacccagaagacgaaaagcagttgtgataaaagaatgtgtagatatgtatgtgcctaacccgctcaaaaacaacattaaactctactataaagaaactgagagtgaaagccatcgagttataattgacaacattttgaaattaaagcagctgacgagaatttgtatgcgataaatttttattgacgcaattttattatttagatgtatgcaacttgttatttaaacaacagagataaaaatatctaagatattcaccttattgcaagatatttaaaatgctctagagttaaaagtatgatgtaaagaccattggcctggacaattaaaaaagggagctttatgactaatccaatcggtatcaataatttatctcaaagttcaaatatagcgaatgcaacgggtgatgaagtcgtatcattagataaacacatcaacaccagtgctactgatacagatcaaatacaagcatttatagtttcaacatggatggcgccttttcaaaatgatatgtattcagaagataatcctatctcaccttactataaaattgagtggtagacgattgaccaaataaatcataacgagatacttttataatagtatctcgttcctttcattcaatcctcacacatgaaaaaatatgcgctcaccaaaagttaaattcttaaccatcttcacgttttgtatatttattacaaaaatgtctttcgccagcaactcttgctctaatgaagcaggaacaatgttcagaatcgaaccaaatttaattaaagctatcgctcttgttgaaagcaatctaaaaaaggatagcataggcaagaacagagataagaataacaatataaagagtttagattattggttaatgcagataaaccagatgcatattcccctgttaaaaaaacgtggaataataaaagatgaacgagatttgttagataacccttgtctgaacattaaaataggaaccgagattttatataaccatttttcacgttgtggagtaacgtggcaatgcctggggacttataatgcgggttttgcaatggataaccaaaaaaagagacagcaatatgccccaaaatatatattgtatataccaggcttaatgaactagacaatcgtaaggcttcagcaaaatgagcctaaagcctcttttttttatatagtgcaaacacccatacgtaaagctgttttgatcaactcgataccactgtgaacatctaatttcttcatgatattgagtctatgagtttcgactgttttcctgcttaactgcaagaaattagcgatttctttgtttgttttaccatcagctatgagttgtaatatttctgactcacgatttgtaagttgattatcagaggaatacctggaagatattttttcacaatccatatgtacactatcaaaataagtgtaaccattactaatcgaatcaatagcacgatttagtttcgccgggtgactggttttccatacgcatcctttcgcacctgcttcaagcaattttattgaatcaatatacggcatctttgctacaaatgtaataatatgagcatctatcttatgcgatttaacccattttacgagttcggcccccatcattccacctgcaaattctcctaaaataaatatttaggctgtagatttgttacactccgctatagctttcttcagatctttatagcccccaacaacctcatataaatcaggataatgtccgagaaatccaattatcccatcaatcataaacggctgctgatctgaaactacaattttaatttttcccatatattcatcctgagtgtaaatgctttaacgcattcatttataatcatcccttccattattattataagcaaaatccaaagaatacattgatgaaataataatgaaatataattaaaaataaaatttttgcgtaaaaaaataccacaggcattaaaaaatcatgagatgattaaaatattacaattagattatattcaaatcattaaacttgagccagggagctataagtcctcagggcttgccaaaacagaattattcatatccaaagaatgtgtttcaaacattttttcaactaaataatgtctggcttgttcgcagatttcgttaaccttgtcaggggagaaacaatgattattaattaaatattgctcacaattatccacaaattcctgcggactaaattcagcaataaattgatcggtaaaaaacacaaaacgcttatcatcatgaaatgtaatatggacattccatattgatttgtcgacaaaatatgactctacttcaagagacttatctttgaaactggtaggtatatggagatttacaggacctgatattgatggtaattttgttacccaactttcaaaaattttgataaaaacatcaacttcttctgaaggttttaacaatatactcttcagatcgtttatcatgtttattcttttttttcaagttctgagcatagcaagcttatcaagggtataaaattatccatctcatcaataatgccttttgtatagccatcataataaccttgaataaatttttcttctctcttttcctcaatactctgaatttttgcggtggtttcaagaaggattttttctttaagagaaactatttctttcaatccatcagaaatttttcttttaatcacaacaccatttgcaggagattttatcaagctcatctctattttttttcgcataaaatgtaattctctctaaaagtgttgatgcaagtggtaacggcgattgtatgtggtcaacaaaatcaggaaataataaattaaatcgttgctgcattgccaatggttgttgccttatatagggtaacaacgttgaaaaaccacatgtgatgatattgtgatagttagcgatgccgggtttgtatcgtgccttttcatttatttccagcggtatagctgataaataatcccttagtacatcaggaaccttataaaaaaacccgcgttctgcaaacctttctcgataaaagtgacaaccactgagtaaacagatcaatggaagtaaattccaattgtttattggatttgcccctatatttccagacatctgttatcacttaacccattacaagcccgctgccgcagatattcccgtggcgagcgataacccagcgcactatgcggatgccattcgttataatgctcgaacgcctctgcaaggttctttgctgccgttaacccgtctggtttgggcatgatactgatgtagtcacgctttatcgttttcacgaagctctctgctattccgttactctccggactccgcaccgccgtgttcttcggttcaagtcccaacatccgggcgaactggcgtgtttcattagcccggtagcatgaaccattatccgtcagccactccactggagacgacggaagatcgttgccgaagcggcgttccaccgctcccagcatgacgtcctgtactgtttcactgttgaagccgccggtagtgaccgcccagtgcagtgcctcacgatcacagcagtccagcgcgaacgtgacacgcagtctctctccgttatcacagcagaactcgaacccgtcagagcaccatcgctgattgctttctttcacggccactctgcctgtatgtgcccgtttcgatggcggtacagcaggttttcgctcaagcaacagcgcattctggcgcatgatccggtaaacacgtttggcattgatcgcaggcataccatcaagttctgcctgtctgcgaagcagcgcccatacccgacgataaccatacgttggcagctctccgataacatggtgtatacggagaagcacatccgtatcatcagtgtgacgactgcggcggccatccatccagtcatcggttcgtctgagaatgacgtgcaactgcgcacgcgacacccggagacaacggctgactaagcttactccccatccccgggcaataagggcgcgtgcgctatccacttttttgcccgtccatattcaacggcttctttgaggagttcattttccatcgttttcttgccgagcaggcgctggagttctttaatctgcttcatggcggcagcaagttcagaggcaggaacaacctgttctccggcggcgacagcagtaagacttccttcctggtattgcttacgccagagaaataactggctggctgctacaccatgttgccgggcaacgagggagaccgtcatccccggttcaaagctctgctgaacaattgcgatcttttcctgtgtggtacgccgtctgcgtttctccggccctaagacatcaatcatctgttctccaatgactagtctaaaaactagtattaagactatcacttatttaagtgatattggttgtctggagattcagggggccagtctaaacttgctcttttcttctggtgtttatctttgaaagatttgtaggataaataacattaagtaaagccgcatcggcttctctgtaatgtttatctttttccagataacctggggattctccccctaaatcaagctgtaacgttattctttcataacctttatctatgaggtggttcaacctcgttgttgaaagagtttcatccagttcattgactttagcttcgcgtagtaaatcagagacaaaaacagagtctttcttcgagagtaggtttgacaaacgttccagtccagaggtcaccagtgcaacggaagatgtgtttaatcgggcatcttcttcccatgctcaggaatcttccataacatagaaattggctttatccagataagcaatcagcagcgcaaccgactttaatcggtcacctttttgccaatcttcagcgttaatagtaccagtgttgattgcttgtataaggagatcaaggtaaagacctaaagcatcattttgtttatggttccacagctgcggcttgccttcttcctgcacatctgccatcacgggggagttgctgtcaaatcggatatgcacagcattcatttgcacgggaattccatccagtcgttttgggttgctaatgacgtcctgcatccgcttaatctggtcgggcgtagacatataatcccacagggtgagcagaaccttttttgcggctacactatttccctgatctgatactaatgccatatagccccataaactatccctcaaccagacagcatcatagtgggtttctgccgctgttttgtcatcttcgaaagtagaagcaagaataaacgttccccagggtttctccgtcaacgttaactttcgtgtgttttctgttaatgttagcaatccttgaatttcgtctttggtatagtggctctttatttcattttgtaatttggctgagtgaatcagaagacgataattaggatacttatctggatttaacgataaataacttttatctgttgctgcccccgtggaattaagaatgttaaatacagattcactcgtcacttctgcccctgtcgcctggcatgtgccgcacgaaaatataccagcgagcagaagagttaatgcagatttccctttcataaaatattccatcaatcgtttgttaaaagcgtagataaccacttatttaacaacttgaaaataaggtgttttacctgggttgttacaaaaggattgcattgcgtaaacgctttttatttacaacaaaatggggaagtattacggcgaagataaattggagcgggcgaagggaatcgaaccctcgtatagagcttgggaagctctcgttctaccattgaactacgcccgcttcgagatgcgtaaggcattataaaccttacgctctccttagcaagtgccacgctgctgactgctgattaattcgccatcagcattttggcttgctgccctgaggcggcaagtaacgtagcggatcaattgccgttgcacggtaacgaatctggaaatgcaggcgaacagatgccgcatccgtgctccccatagtggcgattttttgcccagccttcacgctttgcccattatttaccagcatcgtgtcattatgggcgtaagccgtaatgtaatcttcactgtgtttaatcatgatgagattaccgtagccacgcagctggttgcccacatacaccacctttcctgcacccgcggcgtaaataggtgtaccccgtggagctgagatatcaatccctttattgccgccatctgctgtcgaatacggcatgataactttccctgtcgttggccataaccaacaacgttgccctactggcggccaggatgatttcggtaccgctgatgacggtgtaaccgatgcggttttggtcgttgatttggcggttgatttacgtgtaatactgctacttttcgccccacccagttttagtttctgaccaacttcaatggtgtaagggggggaaatgccgttcagtcgcgccagttcttttacgctggttcccgtggtgcgcgaaatacgatatagcgtatccccccgtttcacggtgtaaacggagccggaatacgttcctgtatcggatgatttgctacccgaacagcccgccaaaagcagtccaaccgataacaacatcacgatacccagagattttttattcaggcgtcccgcactcaaaatctttcctcgcttaaaaaacaagacgccttatcatagcagccagcctcttgatacccaatctcttgcttctggaaaaacgtggtaatagagaaagaggttaatttcatttggcaaagggaagtatcatcagcaaaatattcgctgtagaggtatcgaacttcctgactttttaccctatttcccatcctgatgcgtaataatcccaatttatcacattgattttatcgccactcatattgatacgtatcactgcccctattcagagtcctgtttcgtatcatatctgtgtttttttaacgtcatcacacttcctacctcccctaacgcttatcgtcgtttctggcgtaaatcttgcctgcttagactaaatctttgccataagaaccaaatgttcaaatcgaggggatttctatggaagcgcgggaagcaaccgctacgggtgaatcatgcatgcgcgtcgatgccattgctaaggtcaccgggcgggcacgatatactgacgattatgttatggcgggcatgtgttatgcgaaatatgtacgtagccctatcgcacatggttatgccgtaagtattaatgatgaacaagccagaagtttgccgggcgtactggcgatttttacctgggaagatgtgcctgatattccattcgctacagctgggcatgcctggacacttgacgaaaacaagcgcgataccgccgatcgcgcactgctaactcgccatgttcgtcatcatggtgacgccgttgccatcgtcgtggcccgcgatgaactcacggcagaaaaagcggcgcaattggtcagcattgagtggcaagaattacccgttatcaccacgccagaagcggcgctggcagaagacgctgcaccaatccataacggtggcaatttactgaaacaaagcacgatgtcgacgggtaatgtccaacaaacaatcgatgccgccgactaccaggtacaggggcactatcagacccccgttattcaacattgtcacatggaaagcgtaacatcgctggcgtggatggaggatgactcgcgaattaccatcgtttccagcacccagatcccgcacattgttcgccgcgtggttggtcaggcgctggatattccctggtcatgcgtacgagtcatcaaaccatttgtcggtggcggttttggtaataaacaggatgtactggaagagccaatggcggcattcctgaccagcaagcttggcggcattccggtgaaagtttcccttagccgtgaagagtgtttcctcgcaacccgtacccgccacgcttttaccattgacgggcaaatgggcgtgaaccgcgacggaacattgaaaggttatagtctggatgttctgtctaacaccggcgcttatgcatctcacgggcactccatcgcttctgcgggggggaataaagtcgcttacctttatcctcgttgtgcctacgcttacagttcaaagacctgctataccaacctcccctcggctggtgcgatgcgtggttatggcgcgccacaagtcgtatttgccgttgagtctatgcttgatgacgccgcgacagcgttaggtattgatcctgttgaaattcgtttacgcaacgccgcccgcgaaggagatgctaatccgctcacgggcaaacgtatttacagcgcagggttgccggagtgtcttgaaaaaggccggaaaatctttgaatgggaaaaacgccgtgcagaatgccagaaccagcaaggcaatttgcgccgcggcgttggcgtcgcctgttttagctacacctctaacacctggcctgtcggcgtagaaatagcaggcgcgcgccttctgatgaatcaggatggaaccatcaacgtgcaaagcggcgcgacggaaatcggtcagggtgccgacaccgtcttctcgcaaatggtggcagaaaccgtgggggttccggtcagcgacgttcgcgttatttcaactcaagataccgacgttacgccgttcgatcccggcgcatttgcctcacgccagagctatgttgccgcgcctgcgctgcgcagtgcggcactattattaaaagagaaaatcatcgctcacgccgcagtcatgctacatcagtcagcgatgaatctgaccctgataaaaggccatatcgtgctggttgaacgaccggaagagccgttaatgtcgttaaaagatttggcgatggacgctttctaccaccctgaacgcggcgggcagctctctgctgaaagctccatcaaaaccaccactaacccaccggcgtttggctgtacctttgttgatctgacggtcgatattgcgctgtgcaaagtcaccatcaaccgcatcctcaacgttcatgattcagggcatattcttaatccactgctggcagaaggtcaggtacacggcggaatgggaatgggcattggctgggcgctatttgaagagatgatcatcgatgctaaaagcggcgtggtccgtaaccccaatctgctggattacaaaatgccgaccatgccggatctgccacaactggaaagcgcgttcgtcgaaatcaatgagccgcaatccgcatacggacataagtcactgggtgagccaccaataattcctgttgccgctgctattcgtaacgcggtgaagatggctaccggtgttgcaatcaatacactgccgctgacgccaaaacggttatatgaagagttccatctggcaggattgatttgaggataacatcatgtttgattttgcttcttaccatcgcgcagcaacccttgccgatgccatcaacctgctggctgacaacccgcaggccaaactgctcgccggtggcactgacgtactgattcagctccaccatcacaatgaccgttatcgccatattgttgatattcataatctggcggagctgcggggaattacgctggcggaagatggctcgctacgtatcggctctgcaacgacatttacccagctaatagaagatcctataactcaacgtcatctcccggcgttatgtgctgcggccacgtccattgctggaccgcagatccgtaacgtcgctacctacggtggaaatatttgcaacggtgccaccagcgcagattctgccacgccaacgctaatttatgacgcgaaactggagatccactccccgcgcggtgttcgtttcgtcccgattaatggctttcacaccgggccgggcaaagtgtctcttgagcatgacgaaatcctcgtcgcctttcattttccgccacagccgaaagaacacgcgggcagcgcgcattttaaatatgccatgcgcgacgcaatggatatttcaacgattggctgcgccgcacattgccgactggataacggcaatttcagcgaattacgcctggcatttggtgttgccgcgccaacgccgattcgctgccaacatgccgaacagactgcacaaaatgcgccattaaacctgcaaacgctggaagctatcagcgaatctgtcctgcaagatgtcgccccgcgttcttcatggcgggccagtaaagagtttcgtctgcatctcatccagacgatgaccaaaaaagtgattagcgaagccgtcgccgcggcggggggaaaattgcaatgaatcacagcgaaacaattaccatcgaatgcaccattaacgggatgccttttcagcttcacgccgcaccaggcacgccgctctcggaattactccgcgaacaaggactgctaagtgtcaaacaagggtgctgcgtgggtgaatgtggtgcctgtacggtgttggtcgacggcacagcaatagacagttgcttataccttgccgcctgggctgaaggaaaagagatccgcacgctggaaggtgaagcgaaaggcggaaaactttctcatgttcagcaggcttatgcgaaatccggcgcagtgcagtgcgggttttgtacgcctggcctgattatggctaccacggcaatgctggcgaaaccacgcgagaagccattaaccattacggaaattcgtcgcggactggcgggaaatctttgtcgctgcacggggtatcagatgattgtaaatacagttctggattgcgagaaaacgaagtaaaaggatatccggcctgaattcaggccggattcactgaggttatgtgtttaacaactcatatttcttaatcttgcgatagagcgtagcaatgccgatgcccagttcatcagcaacttgcttcttgctgttatgacgtgaaagcgcctcgcggatcatttgcttttccatctcctccagcgccgtgccgcccgcatcatcgagtgacaggtgcgcctcactgacctctgttacatcactttgctccgttgtgccattattcagcagatttggcggcaatagcgtgctgtcgataacttcacctgaaggaaccacgttaaccagatattccatcaaattgcttaactcgcgcaggtttccgggccaacgatgcttacgcaatatttcgacgacatcgggagcaatgccaggataaaccgatcccagacgacgggtatgcagatgtaaaaagtaatgcaccaatagttcaatatcttcctgacgttcacgcagcggtggcagagttatcgggataacattaagtcggtagaagagatcttcgcggaatttaccttcggcaatgaactgggccaaattctgattagttgcagaaatgatgcgaatgtcgacttgtattgggctactggcaccaatcggcagaatttcacgtgcctcaatagcgcgcagtaatttagcctgcaacattaatggcatatcacctatttcatcgagaaacagcgtgcccgtattcgccgcctgaatcaaccctgttttaccgttggcagaagcgccagtaaatgcacctttaacataaccgaacagttcgctctccagaagctgctccggaatcgcggcacagttgatagcaataaagggtttattccgtcttccgctcaacttatggattgcacgggcgacgacttctttacccgtgccgctttcaccaaccaccataacgctggatgggctgggtgcaatacggctaatgagtcgttttaattgccgcataacacggcactcgccaaccaattgttcaatatgcggttcatcaggtgcatttgctacagaaaaactggtatgcgattggtgaaacgccattaaaaataattgtcggccctgaatgttatgcaattgaccaatgattaattcacttttatcgtcccatgaaacaatatgctgcatatgtccatgggtaaaattactctcaaatgttaatggtctgaaacggataggtttcccaataatattattttgcacaacaccaagtgtttttaaggcagtctgattaacaaactgaacccgattttcatcatctacaactaatacgccctgatccatattatcgatcatggtcgcaaatattttactgatgttatctcctggcccctgatcctccagaagtttcgaaacaaaaatggtggatatatggcgaacataatcagaaaattcgcgtaaattatcactgatatgctcttgttgctcgtgggtaacggcaatcaaacttatcaccccaacacaacgatcctgtaaaatgacaggcgtacccagaaatgctttttcgcggcaattttctttactatcgcaaccttcgcaaaggggatcgaagcgagactgtgtcacaactttttcagttttcgtttccaggacgtggcggagcaggcgtgagttgccgctcaactggcgaccaagaaacttcccatacgcgcccgttccggcaacgcgacacaagttttcatcaacgatctcaacctcaagctgcaaaacgctggcaagcattctggcaaaacgctgaattgtcggttgaatttgcatcaatactgactgcgtagtagcaagctccatagctttaccttccagacttacttaaaagtcgatcattgaagacgttgatggttcacagatcatgatgatattaactcaggcgaaattggctttgataaaaacataagatttttatcattttctaatgaaattatggaagagatatcacatttctatatcaatatgagaattacggcggtgagtttatcaaactgaagagagatagcctgcccctttatcttatttctgatacttagcagcaaataaataacgcgataaaaaaagccaaacgttttcgtattttacaaacaaccagaagctggcatcaatttgtgatcaaccccacacattatccgtcaaattagtcttttgcagccgcgcggataattctggcacacttattgttagtcccaggtatagctgtgaaaacaccaatcactttggcaagtcacagtgaaataaaccactttgcctgtcattccactaccgggactttatgatgaaaactgttaatgagctgattaaggatatcaattcgctgacctctcaccttcacgagaaagattttttgttaacgtgggaacagacgccagatgaactgaaacaagtactggacgttgccgcagcattaaaagcactgcgtgctgaaaacatctcaaccaaagtctttaatagtggattaggtatttccgtattccgcgacaactccacccgtacccgcttctcttatgcttccgcgcttaacctgctcggccttgcacaacaagatctcgacgaaggcaaatcacaaatcgctcacggcgaaaccgtgcgtgaaaccgccaatatgatctccttctgcgccgacgctattggtattcgcgacgatatgtatctgggcgcaggcaacgcctatatgcgtgaagttggcgctgcacttgatgacggttacaagcagggtgtactgccacagcgtccggctttagtgaacctgcaatgcgatattgaccacccgactcagtcaatggctgacctcgcgtggttacgtgaacactttggttcactggaaaacctgaaaggtaaaaaaatcgccatgacctgggcctactctccaagctatggcaaaccgctctctgtaccacaaggcatcatcggtctgatgactcgcttcggtatggatgtcaccctggcccatccggaaggctacgacctgatcccggatgtggttgaagtggcgaaaaacaatgctaaagcctccggtggtagcttccgtcaggtcaccagcatggaagaagccttcaaagacgcagacatcgtttatccgaagtcatgggcaccttacaaagtgatggaagagcgtactgaattgctgcgtgcgaacgatcacgaaggcttaaaagcactggaaaaacagtgtctggcacagaacgcgcaacacaaagactggcattgtactgaagagatgatggaactgacccgtgatggcgaagccctgtacatgcactgcctgccagctgatatcagcggcgtatcctgtaaagaaggtgaagtgactgaaggcgtattcgaaaaataccgtatcgctacctacaaagaagccagctggaagccttatatcatcgccgcgatgatcctgtcccgtaaatacgccaaaccaggtgcactgctcgagcaactgctgaaagaagcgcaagaacgcgtgaaataacccctcgggccgatcagctggtcggccctctatttccagaggccaaaaggataggatatgtccgttttctcattgaagattgatatcgccgataacaaatttttcaacggcgaaacatcaccgctcttttcgcaaagccaggccaaactggcgcgccagttccaccagaaaatagctggttatcgcccaacaccgctttgtgcgctggacgatctcgcaaacctttttggtgtgaagaaaattctcgtcaaagacgaatcaaaacgattcggtctgaacgccttcaaaatgcttggcggtgcgtacgccatcgctcaattattgtgtgaaaaatatcatcttgatatcgaaacgctgtcatttgagcacctgaaaaatgccatcggcgaaaaaatgactttcgcgaccaccaccgacggcaaccacgggcgcggtgtggcgtgggcagcacagcaactcggacagaatgcggtgatttacatgccgaaaggttctgctcaggaacgcgttgacgccattctgaacctcggtgccgagtgcatcgtcacggatatgaactatgacgataccgttcgcctgaccatgcaacacgcgcagcagcacggctgggaagtggtacaggacacggcatgggaaggttacaccaaaatcccaacctggatcatgcaaggctacgcaaccctggcagatgaagccgtcgagcaaatgcgtgaaatgggcgtaaccccgacgcacgttctgctgcaagccggtgtcggagcaatggccggtggtgtgctgggttatctggtcgacgtctatagcccgcaaaatctgcacagcattattgttgaacctgacaaagctgactgtatttatcgctccggcgtcaaaggcgacatcgtcaacgttggcggtgatatggccaccatcatggcaggcctggcctgtggcgaacctaacccgctgggctgggaaatcctacgtaactgcgccacccaattcatctcctgccaggacagcgttgccgcattaggtatgcgcgtgctgggtaatccgtacggcaacgacccgcgcatcatctccggtgaatccggcgctgtcggtttgggcgttctcgcagcggttcattatcacccgcaacgtcaaagcctgatggaaaaactggcgctgaacaaagatgccgtggtgctggttatcagcactgaaggcgacaccgacgtgaagcactaccgcgaagttgtctgggaaggcaaacacgctgtagcaccttaatcaccctattggaactgctccctgcaaaacggggagtaaaaaatctggagaaaaataatggctaagaatattccattcaaactgattcttgaaaaagcaaaagattaccaggcggatatgactcgcttcctgcgcgacatggttgctattcccagtgaaagctgcgacgagaaacgcgtagtacatcgtattaaagaagagatggaaaaagtcggcttcgataaagttgaaatcgacccgatgggcaacgttctcggttatatcggccacggcccgcgtctggtggcaatggacgctcatatcgataccgtcggcattggcaacatcaaaaactgggacttcgatccgtacgaaggcatggaaactgatgaactgattggtggtcgcggtacttccgaccaggaaggtggcatggcctctatggtttatgccggtaaaatcattaaagacctcggtctggaagatgaatataccctgctggttaccggtacggtgcaggaagaagactgcgacggtctgtgctggcagtacattattgaacaatccggcattcgcccggaatttgtggtcagtaccgaaccaaccgactgccaggtataccgtggtcagcgcggtcgtatggaaattcgtattgatgttcagggtgttagctgccacggttctgcaccagaacgcggtgataacgccattttcaaaatgggtccgattcttggcgaattacaagaactctcccaacgtctgggttatgacgaattcctcggcaaaggcaccctcaccgtttctgaaatcttcttcacatccccaagccgttgcgctgtagcagacagctgcgcagtttcaatcgaccgtcgtctgacctggggcgaaacctgggaaggcgcgctggacgaaatccgcgccctgcctgcagtacagaaagctaacgcggttgtttctatgtacaactacgaccgtccgtcctggactggcctggtttacccaaccgaatgctacttcccgacctggaaagtggaagaagatcacttcaccgttaaagcactggtgaatgcctacgaagggctgtttggcaaagcgccggttgttgataagtggaccttctcaactaacggcgtatctatcatgggccgtcacggcattccggtgatcggctttggcccgggtaaagaacctgaagcgcatgcacctaacgaaaaaacctggaaatctcacctggtgacctgtgccgcgatgtacgctgcaatcccgttaagctggctggcaacagagtaattactcttcacttattcccctccggttcgccggagggtttttggagtttgctatgcgcgtattgatcaaaaacggcactgtcgttaacgcagatggacaagccaaacaggatttgctgattgaaagcgggattgttcgccagttgggcaacaatatttcgccgcagctcccgtatgaagaaattgatgccactggctgttacgttttccctggcggcgtggatgtccatacgcatttcaatattgatgtcggcatcgcgcgcagttgtgatgatttttttaccggtacccgcgcagctgcgtgtggcggtacaacaaccattattgaccatatgggatttggcccaaacggctgtcggttacgccatcaactggaggtttatcgtggttatgccgcccataaagcggtcatcgattacagctttcacggtgtgatccagcacattaatcacgcaatcctcgacgaaatcccgatgatagtcgaggaaggactgagcagttttaaactctatttaacctatcaatacaaactcaacgatgacgaggttttgcaggcattacgccgcttgcatgaatccggcgcgctgaccaccgtgcacccggaaaatgatgcggctatcgccagcaagcgggcggaatttatcgccgcagggttaaccgcgccgcgctatcatgccttgagtcgccctctggaatgcgaagcggaagccatcgcccgcatgattaacctggcacaaattgccggtaacgccccgctctatatcgtgcacctgtctaacggcttaggtctggattatctgcgtcttgcccgtgcgaatcaccagccagtctgggttgaaacctgcccacaatatctcctgttggacgaacgcagttacgatacagaagatggcatgaagttcattcttagcccaccgctgcgtaacgtacgcgagcaggacaaactgtggtgtggcatcagcgatggtgcgattgacgtggtggcaaccgatcactgcaccttctcgatggctcaacgcctgcaaatttctaaaggcgatttcagtcgctgcccaaatggcttacccggtgtggaaaaccgcatgcagttactgttttccagtggcgtgatgacgggacgtataacaccggaacgctttgttgaattaaccagcgcaatgcccgccaggttgtttggcctgtggccgcaaaaaggattattagcgcccggttccgacggcgacgtggtgattatcgacccacgtcagagccaacaaattcagcatcgccatctccacgacaacgccgactactcgccatgggagggttttacctgtcagggcgcgattgtcagaaccttatcccgtggtgaaacgattttctgtgacggcacctttacaggcaaagccgggcgaggtcgtttcctgcgacgcaaaccgtttgtccctcccgtgctctaaccactgccagggatctatacacaatcaagaatgatgagtgaggaaaaatgagtaagaaaattgttctcgccctgggcgggaatgcgctgggcgatgacctggccgggcaaatgaaagcggtaaaaattacttctcaggcaattgttgatttaattgcccagggacatgaagttatcgtcactcatggtaacgggccgcaggtgggcatgattaaccaggcctttgaagctgccgcaaaaactgaagcgcactcgccaatgctgccgatgtctgtctgtgttgcattaagccagggttatattggttacgatctacaaaacgctttaagagaagaactgctttctcggggcattaataaacctgtagcaacgctggttactcaggtcgaagtcgacgctaacgatccggcattcctcaacccgaccaagccgatcggttcgttctttaccgagcaagaagcagagcaactgacaaaacagggttacactctgaaagaagatgctggtcgcggctatcgccgtgttgttgcctcgccaaaaccggttgatatcattgaaaaagaaacggttaaagctctggtagatgcaggtcaggtggtgatcaccgttggcggtggtggtatccctgttattcgtgaaggtaaccatctgcgtggtgccagcgcggttatcgataaagactgggccagcgcccgtttagcagaaatgattgatgccgatatgctgatcattctgactgcggtagaaaaagtggccattaacttcggtaaagagaatgaacagtggctcgatcgcctgtcattaagtgatgctgaacgctttatcgaagaaggtcattttgcgaaaggttctatgctgcctaaagtggaagctgccgcctcgtttgctcgctctcgcgcaggtcgtgaagcactgattaccgtattgagcaaagcgaaagaagggattgaaggcaaaacaggaacggtgatttgtcagtaatttaaaggccgggtgggtaataccatccggccaaagattgtcaagtaagtgcgctttgttgatgccggatgcggcgcgagcgccttatccgtcctacaaaacatcgcaaattcaatagattgcaatgcacttgtaggcctgataagcgtagcgcatcaggcaatttggcgtttgtcatcagtctcaggccgggtgggtaataccatccggccattttcatttaagccacttccagcacttcttttgtcgctttcacgccctgatgcatcaacatcattaacgcctcaagtacgccgccgccaatcgcccgggctttatcagaaacgctggtgaaatcagcggtttcaccacgaggatcgatatcaccaattttaaaaccaccaaccactgccaggccgtcgttcaacaagccacgcaccatccccgtcaacggtgctttaatttcatgctcaccaatccaggcaatcacatcgccctctttcaccagatcgcctaatttcacgttggatcgcataatgcctgcagcaggagcacggatcacccgtcgggtggtatgccccataatattgccaggaacaccggtattctcctgcgcacaaccagagtaaatcacctgaccgagccagtgcccgcgatttgtttcaattaccgcatgacaatccttcccagcagtaaagcccggcccaagcgcgattgttactggtgccatatctgcccgcgttcccaaattctgtttcgccagaatagcgtccaccacgcaaagcggtttcagttcatcaagcaatgaacaggcgggatctaccatcacaggaatgaatccgcgttcggtaagtttcatcgcttccgcagagctggttgccaggcgagcagtgacgccttcgaccgtcatttcgccatcgaacacggcctgggcaaacgccacggtacaacgaatcactgtcggtttttccacttccagcatgatcactttaaaacccgcatgatacagacgtagcgccacaccactggcgatatctcccgcaccgcgaatcaccaccagctggtgtccggaaggatgagaaggtttcatcatcagcccacccggcgcgttatttttcacctgtaatatttctgccagcacgctgatggcgatctcctgcggcgtttccgcacctatgttgtaaccaacgggcgcatgtaaacgggcaatatgttcttcagccacgcctttctcacgcaattgacgcaggaaaagctgaaccttgcgacgacttgccagcaaccccaaccatgcaatgggctgttcaatgagtttgtcgagggcttcacgatcctgattattcgtggcaatcaggacaaaattatcagggcgaatatccagtgcttccactgccgcaccaaacgactcagcatggagaagcgtggttgatggtgggaatagttcaggattgaggctttcgcgataaatatcagcaacggcaatatcaaatcctaatagcgccgcactctgggctatcgcccggttgacatgccccgcgccaatcaacaccagacgtggacgcataccatggacgctgataaatactgacattgcacctccacaatctgacccgacagcatccgcaccgttacgagccatacgtccatggaataatcgcggcttacgttcctgcaatgcctgaagcgactcttcaatcaccttccgctcaaccattccgccaccaattgtaccgacgatagaaccatcggcgcgcactaacatttgtgcagaatggcggggagtcgagcctcggctatcaacaatttgcgccatagcaaacggacaattttgctcttcgagttttgcagcctctgtgaaaatattcataccaacctcaatggatatcctttcagtaacccggaatacccgggccgctaattcacaaatctgcgcgcgattgcaggatgttcttgtatatcgcccagccagattgcctctacgtcgtgttgttgcagcggttgaaggagctcgctttgtgcaatcgcattctcacattgagaaaaacggttaatgaaccagactcgccgacaaccttgcggtacgtttttaaacgccccctgagggtggcgaaccagcgcaacgagatcgctcagttgcaaggttgcatcaggtgttaacccggtaatatcagcaaactgcgaccagcgatggacattttctgtgctcactttcgcgcccaaagtatgtcctcccatcacagcaatcacgcagcaactgcttttgggtatgcaaggttcgtgctcatcaggcgcttttaacggcattccacgcgagccatctgcttcaatgagaattacgtcacactctggtcgttgcaccagtgcatcaatcgcttctggcgtaaatccctgcacttttccctggttcgctttccagctgtgaaaacaaaatgaaatgggggatgtaagagacgcatgaggaagcatggcgggatcacgacagaaaaccacgggccagtgagacgttggcataaacatatgtgtcgtcgtcgtgattaacacacgcctgccgctagcctggagcagttctgccagccaaaaaagcaagctggttttccccccagcaccaacaacagaaatcacagtgggacgtttctgcgcacctaaatcaatgactaatgccgatgggtcaactatacttttcacgagtctttatgacctctctgggataaattatccccaacttaatccatcaggaagtaacgcaattatcaggcgttattagcccctataaataatggaaccactatgtcagccatcgactgtataattaccgctgccggattatcatcaagaatggggcaatggaaaatgatgttaccctgggaacagggaacaattcttgatacaagtatcaaaaatgcgttgcagttttgtagccgaattattttagtcaccggctatcgtggtaatgaactgcacgaacgttatgcgaaccagagcaatatcactattattcacaacccagattatgcgcagggtttactaacatccgtcaaggccgcagtacccgcagtgcaaacagaacattgttttctcacccacggtgacatgccaaccctcaccatcgatatttttagaaaaatctggtcgttacgaaatgatggcgcaatactgccactccataatggcatccccggccatccgattttagtgtcaaaaccatgcctgatgcaggcaatccaacgacccaatgtcaccaatatgcgtcaggcactccttatgggagatcattattccgtcgaaatagaaaatgcagaaataattttagatattgatactccggacgactttattacagcgaaggaaaggtatactgaaatttagaaaacgtagttaaacgattgcgttcaaatatttaatccttccggcactcattatcataatgataaggaatcactgattttgagaaaagagaaaaattgataaatgggctggcaataataattttcaggagtgattttaattctcatttagcacctgtgagttcattcacaaaaagcccttaagtttcgagccgcctcacatttttttatatttcccgccaaacctggcaagagtggtgcgattgttgctctatccccctaaaccaccggatttctcaacaccggtcactcaatgatatctgtataagctaaggagagggttatgggggatattatgcgtcccattccgtttgaggaacttttgacgcgcatatttgatgaataccaacaacaacgctcaatctttggtattcccgagcaacagttttactcacctgtaaaaggtaaaactgttagcgtcttcggtgaaacctgtgccactcccgtcggccctgccgctggcccgcacacgcagctcgcgcaaaatattgtcacttcctggctgactggcggacgcttcatcgaactaaaaaccgtccaaattcttgaccgcctggagctggaaaagccctgtatcgatgccgaagacgagtgctttaacaccgaatggtctaccgagtttaccctgcttaaagcctgggatgaatacctcaaagcctggtttgccctgcaccttctcgaagcgatgttccagccttctgattccggtaaatcgttcatctttaatatgagcgtcggttacaacctcgaaggtattaagcaaccgccgatgcaacagttcatcgacaatatgatggacgcatctgaccatccgaaattcgctcaatatcgcgatacgctgaataaattactccaggatgacgcatttttagctcgccacggattgcaggaaaaacgcgaaagcttgcaagccttacccgctcgcatccccaccagtatggtgcatggcgtcaccctctccaccatgcacggctgtcctccgcatgaaatcgaagccatttgccgctacatgctggaagaaaaagggctcaacacctttgtgaaacttaacccgaccttactggggtacgcgcgtgttcgtgagatcctcgatgtctgcggtttcggttacataggcttaaaagaagagtcatttgatcacgacctcaagctgacgcaagcactggaaatgctggaacgcctgatggcactggcaaaagaaaaatcactcggctttggcgtaaaactgactaacactctcggcaccatcaacaataaaggcgcactgcctggtgaagagatgtatatgtcaggccgtgcgctgttcccgctctccatcaatgttgcagcagttctctctcgcgcctttgacggcaaactgcccatttcttattccggtggtgccagtcagctgactatccgcgatatttttgatacaggtattcgccctattactatggcaaccgacctgctgaaacctggcggctatctgcgcttaagtgcctgcatgcgcgagctggaaggctccgacgcctggggacttgaccatgttgacgtcgaacgactgaacagactggcagcagatgcgttaaccatggaatacacccagaaacactggaagccagaagagcgtattgaagtggcagaagacctgccgctgaccgactgctacgttgccccctgtgttactgcctgcgctatcaagcaagatattccggaatacatccgtctgcttggcgaacaccgctatgccgacgcgctggaactcatctaccaacgcaacgctctgcccgccattaccggtcatatttgcgatcaccagtgccaatacaactgtacccgcctggattacgacagtgcgctgaatatccgcgaactgaaaaaagtcgcgctggaaaaaggttgggatgaatataagcaacgctggcacaaaccagccggttctggttcacgccatccggttgccgtgattggtgcaggtccggcgggtctggcagcaggttacttccttgccagagcgggccatccggttacgctgtttgaacgcgaagccaatgcgggcggcgtggtgaaaaatatcattcctcagttccgtattcctgcagagttaattcagcacgatatcgattttgttgccgctcacggcgtgaaatttgagtatggctgctcacccgatttaaccattgagcagttaaaaaatcagggcttccactatgttctgattgccaccggcactgataaaaatagcggtgtgaaactggcgggcgacaaccaaaatgtctggaaatcactccccttcctgcgtgaatacaacaagggtacagcgctcaagctgggcaaacatgtggtcgttgtcggggcgggtaacaccgcaatggactgcgctcgtgcggcgttacgcgttccaggcgtagaaaaagcaacgatcgtttaccgtcgttcactacaagagatgcccgcatggcgcgaagagtatgaagaagcgttgcacgacggcgtagagttccgtttcctgaataatccggaacgtttcgatgctgatggcaccttaaccttgcgcgttatgtcgcttggcgaaccggatgagaaaggtcgtcgtcgtccggttgaaaccaatgaaacagtaacactgcttgtagacagcctgatcaccgccattggtgaacagcaggatactgaagccctgaatgcgatgggcgtgccgctggacaaaaacggctggccagacgtcgaccataatggcgaaactcgtctgactgacgtctttatgatcggcgacgtacagcgcggaccatcctccattgtcgctgctgtcggaaccgcgcgtcgggcgaccgatgccatccttagtcgggaaaatatccgttcccaccagaacgataaatactggaacaacgtcaatccagcggaaatctatcaacgtaaaggcgatatctctatcacgctggtgaacagtgacgatcgtgacgcgtttgtcgcccaggaagccgctcgctgcctcgaatgtaactacgtttgcagcaagtgtgtggatgtctgcccgaaccgcgccaacgtctccattgcggtcccaggcttccagaaccgtttccagacgctgcacctcgacgcttactgtaacgaatgcggcaactgcgctcagttctgtccgtggaacggtaaaccgtacaaagacaaaatcaccgtcttcagcctggcgcaagactttgataacagcagcaacccaggcttccttgtggaagattgccgggtacgagtacgtctgaataaccaaagctgggtgttaaacatcgacagcaaaggtcagtttaacaacgtaccaccggagctgaacgatatgtgccgcatcatcagccatgtccaccagcatcatcattatctgctgggccgcgtggaggtgtaatcatgttgattctgaagaatgtcactgcggtacagctacacccggcaaaagtgcaggaaggcgttgatatcgccatcgaaaacgatgtgattgtcgctatcggcgatgccctgacgcaacgctaccccgacgccagcttcaaagagatgcatggccggattgtgatgccagggattgtctgctcgcacaaccatttttactcggggctttcccgcggaattatggcaaacatcgccccttgcccggatttcatctcaacgctgaaaaatctctggtggcggctcgatcgcgcccttgatgaagagtcgctctattacagcggactgatttgttccctggaagcgattaagagcggatgtacatcggttatcgatcaccatgcctctccggcgtatatcggcgggtcgctctccacattgcgcgacgcatttttaaaagttggcctgcgcgcgatgacctgttttgaaactactgaccgtaacaacggcatcaaagagttgcaggaaggtgtagaagaaaacatccgtttcgcccgtttgattgatgaggcgaagaaagcgacaagcgagccgtatctggtggaagcacatatcggtgctcacgcgccgtttaccgtgccggatgccggtctggagatgctgcgtgaagccgtgaaagccacaggccgtggtttgcatattcacgctgcggaagacctttacgacgtttcctacagtcaccactggtacggcaaagacctgctggcacgactggcgcaattcgatctcatcgacagcaaaacgctggtcgctcatgggctgtacttgtcgaaagatgacatcaccctactcaatcagcgcgatgcgttcctggtgcataacgcccgttcaaacatgaacaaccatgtcggctacaaccatcaccttagcgacatccgcaatctggcgttgggaacggacggcattggttcggacatgtttgaagagatgaaatttgccttctttaaacatcgcgatgcgggtggtccgctgtggcctgacagttttgccaaagccctgactaacggtaacgaactgatgagccgcaactttggcgcgaaatttgggcttctggaagccggttacaaagctgatttaaccatttgcgattacaactcgccgacgccgctgctggcagacaatatcgccgggcatatcgctttcggtatgggctcaggcagcgttcacagcgtgatggtcaatggtgtgatggtctatgaagaccgtcagtttaacttcgattgcgattccatttatgcacaagccagaaaagccgctgccagtatgtggcgtcggatggatgcgctggcataaatgacagatgccctcttcccgcagggaagagggttaaataaggaaagaagatgattgaacaatttttcaggcccgactctgtcgaacaggcgctggaactgaagcgccgctaccaggatgaagccgtctggttcgccgggggcagcaaactcaatgctacaccaacccgtaccgataaaaagattgccatttccttacaggatctggaactggactgggttgactgggataacggtgcactgcggattggcgcaatgtctcgcttgcagccactgcgtgatgcgcgatttattcctgcagcgctgcgtgaagccctcggttttgtttactcacgccatgttcgtaatcagtcgaccattggtggtgaaatcgccgcccgccaggaagagtcggtgctgcttcccgtcctgttggcactggatgctgaactggtttttggcaacggcgaaacgctgtcaatcgaggactacctggcctgcccatgcgatcgcctgctaaccgaaattatcattaaagatccgtatcgcacctgtgcgacccgcaaaattagccgttctcaggcaggtttaaccgtcgtgacggcagccgttgcaatgacagaccacgacggtatgcgaattgcgctggatggcgtcgccagtaaagcactgcgtctgcatgatgtcgaaaaacaaaatctggaaggcaatgcacttgaacaggctgtcgccaacgccattttcccgcaggaagatttgcggggcagcgtggcctataaacgctatatcacgggagttctggtagccgacctgtatgccgactgccaacaggctggggaggaagccgtatgatcatccactttactttaaatggcgcgcctcaggagctaaccgttaatccaggcgaaaacgtgcaaaagctgttgtttaacatgggaatgcactctgtacgcaacagtgatgatggtttcgggtttgccggttctgacgcaataatctttaacggtaatatcgttaacgcgtccttgcttattgccgcacagttagagaaggcagatattcgtaccgcagaatctctgggcaaatggaacgagttaagtctggttcaacaggcaatggttgatgttggcgtggtgcagtctggttataacgatccagctgcagctctgattatcaccgatcttctcgatcgcatcgccgcacctacccgcgaagagatcgacgacgcgctttctggtttgttcagccgcgatgctggctggcagcaatactatcaggtcattgaactggcggttgcacgtaaaaataatccgcaggccaccattgatatcgctccgactttccgtgacgacctagaagtcattggtaagcattatcctaaaactgatgccgcgaaaatggtgcaggcgaaaccctgctatgttgaagaccgcgtaacggctgacgcctgcgtcattaaaatgttacgtagcccacacgctcacgcactgattactcatctggatgtcagcaaagctgaagccttaccgggcgtcgttcacgttattactcacctgaattgcccggatatctactataccccgggtggtcagagcgcaccggaaccgtcaccgcttgaccgccgtatgttcggcaagaaaatgcgtcacgtcggcgatcgtgttgctgcggtcgtcgcagaaagtgaagaaattgcgctcgaagcactgaagctcatcgacgttgaatatgaagtgcttaagccggtaatgtcgatcgacgaagcaatggcggaagatgcgcctgtcgtgcacgatgaaccggtggtgtatgttgctggtgcgccagatactctggaagacgataacagccatgcagcccagcgcggcgagcatatgatcatcaacttcccgatcggttctcgccctcgcaaaaatatcgccgccagtattcatggtcatattggcgatatggacaaaggctttgccgatgccgatgtgatcattgagcgaacctataactcaacgcaagcgcagcagtgcccgactgaaacacatatctgctttactcgtatggacggcgatcgtctggttatccacgcctccacccaggtaccatggcacttacgccgccaggtcgcgcgcctcgtgggcatgaaacagcataaagttcatgtcattaaagagcgagttggcggcggttttggttccaaacaggacatcctgctggaagaagtgtgcgcctgggcaacctgcgtgaccgggcgtccggtactgttccgctacacccgtgaagaagagtttattgctaacacctctcgtcacgtcgcgaaagtcaccgtcaaactgggagcgaaaaaagatggtcgcctgacggcagtgaagatggatttccgcgccaacactggcccttacggcaaccactcactcaccgtaccgtgtaacggaccggcgctgtcgctgccgttatatccgtgcgataacgtcgatttccaggtcaccacctactacagcaacatttgcccaaatggtgcttatcagggttatggcgcaccgaaaggtaacttcgctatcaccatggcattagcggaactggctgaacagttacagatcgaccaactggaaattatcgaacgtaaccgggtacacgaagggcaagagctgaaaattctcggtgcaatcggtgaaggtaaagcgccgacctccgttccttccgccgccagctgtgcactggaagagatcctgcgtcagggtcgcgagatgatccaatggtcgtcaccgaaaccgcaaaatggtgactggcacatcggtcgcggcgtcgccattatcatgcagaaatcgggtatcccggatatcgatcaggctaactgcatgatcaaactggaatcggacggcacctttatcgttcattctggcggtgcggatattggtactggtctggatactgtagtgacgaaactggcagcagaagtgctgcactgcccaccgcaggacgtgcatgttatctccggtgataccgatcatgcgttgtttgataaaggcgcatatgcctcgtccggtacttgcttctcgggtaacgcggcgcgtttggcagcggaaaatctacgggagaaaattctgttccacggcgcgcaaatgttgggtgagccagtggcagatgttcaactggcaacgccgggcgtcgtgcgcggcaagaaaggcgaagttagtttcggggatattgcccataaaggcgaaaccggcaccggctttggttcactggtgggaactggcagttatatcacgcctgatttcgccttcccgtatggcgcaaacttcgctgaagttgccgtcaacacgcgtacgggtgaaatccgcctggataaattctacgccttgctggactgcggtacaccggtcaatccagagttagcgttgggacaaatctacggtgccaccctgcgtgctatcggccacagtatgagcgaagagatcatttatgacgccgaaggtcacccgttaacgcgtgatttacgcagttacggcgcaccgaaaattggtgacattccgcgtgatttccgcgctgtgctggtgccgagcgacgataaagtcggcccgttcggggcgaaatcgatctcggaaatcggtgtaaatggcgcagctccggcgattgctaccgcaattcacgatgcatgcggcatctggttacgcgaatggcatttcacaccggagaaaatactcactgcgctggaaaaaatataaataataaatggccgcttcggcggcctgtttctctgtttgaacgatgactaaatagtgactgcgaaaatgagataagccgttctcaaggcgtcctgcgccccaaattcgtgggaatttattttactaattcagatgatcaaatttactttaaaaggagtgaagggatgtctgatataaaccatgcaggttctgaccttatatttgaactggaggatcgccctccctttcatcaggctctcgttggtgccattacccatctgttggcaattttcgttccgatggtaacccccgcgttaatcgtgggtgcggccttacagctttccgctgaaacaactgcctatcttgtttctatggcgatgatcgcctctggtattggtacctggttacaagtaaaccgctacggcatcgtcggttctggcctactctcaattcagtcagtcaatttttcatttgttacggtcatgattgcgctgggcagcagcatgaaaagcgacggttttcacgaagagttaatcatgtcgtcgcttctcggcgtctccttcgttggcgcatttctggttgtcggatcttcatttatcttgccctatttacgtcgggttattacgcctaccgtcagcggtattgtggtactgatgatcggcttaagcctgattaaagtcggcattatcgattttggtggaggatttgcagccaaaagcagcggtacgttcggcaattacgaacatctcggcgttggtttattggttttaattgtggtgatcggctttaactgctgtcgcagtccgttgctacgcatgggagggatcgccattgggctatgtgtcggctatatcgcatcgttatgcctgggcatggtggatttcagcagtatgcgcaatttgccgttaatcaccatcccgcatccgttcaaatacggctttagttttagcttccatcagttcctggtggttggcacgatttatctgcttagcgtgctggaagcagtcggcgatatcaccgccacggcaatggtttcccgccgccccattcagggggaagagtatcagtcccggctgaaaggcggcgtgctggcagatggtctggtttctgttatcgcctccgctgtcggttcattaccattaaccacgtttgcgcaaaataatggggttattcagatgactggcgtcgcttcacgttatgtcgggcgaaccatcgcggtaatgctggttatcctcggcttatttccgatgattggcggcttcttcacgaccattccctcggcagttctgggaggcgcaatgacgttgatgttttccatgattgccatcgcagggattcgcatcatcatcaccaacggtttaaagcgccgtgaaacacttattgtcgccacttctttaggtttagggcttggcgtctcctacgatcccgaaatttttaaaatattgccagcctctatttatgtattagttgaaaaccctatttgtgctggcgggttaactgcgattttattaaatattatcctccctggtggctaccgacaggaaaacgttctgcctggtattacctcagcggaagagatggattaacagtaaaggagtcaatgatgtcaggagaacacacgttaaaagcggtacgaggcagttttattgatgtcacccgtacgatcgataacccggaagagattgcctctgcgctgcggtttattgaggatggtttattactcattaaacagggaaaagtggaatggtttggcgaatgggaaaacggaaagcatcaaattcctgacaccattcgcgtgcgcgactatcgcggcaaactgatagtaccgggctttgtcgatacacatatccattatccgcaaagtgaaatggtgggggcctatggtgagcaattgctggagtggttgaataaacacaccttccctactgaacgtcgttatgaggatttagagtacgcccgcgaaatgtcggcgttcttcatcaagcagcttttacgtaacggaaccaccacggcgctggtgtttggcactgttcatccgcaatctgttgatgcgctgtttgaagccgccagtcatatcaatatgcgtatgattgccggtaaggtgatgatggaccgcaacgcaccggattatctgctcgacactgccgaaagcagctatcaccaaagcaaagaactgatcgaacgctggcacaaaaatggtcgtctgctatatgcgattacgccacgcttcgccccgacctcatctcctgaacagatggcgatggcgcaacgcctgaaagaagaatatccggatacgtgggtacatacccatctctgtgaaaacaaagatgaaattgcctgggtgaaatcgctttatcctgaccatgatggttatctggatgtttaccatcagtacggcctgaccggtaaaaactgtgtctttgctcactgcgtccatctcgaagaaaaagagtgggatcgtctcagcgaaaccaaatccagcattgctttctgtccgacctccaacctttacctcggcagcggcttattcaacttgaaaaaagcatggcagaagaaagttaaagtgggcatgggaacggatatcggtgccggaaccactttcaacatgctgcaaacgctgaacgaagcctacaaagtattgcaattacaaggctatcgcctctcggcatatgaagcgttttacctggccacgctcggcggagcgaaatctctgggccttgacgatttgattggcaactttttacctggcaaagaggctgatttcgtggtgatggaacccaccgccactccgctacagcagctgcgctatgacaactctgtttctttagtcgacaaattgttcgtgatgatgacgttgggcgatgaccgttcgatctaccgcacctacgttgatggtcgtctggtgtacgaacgcaactaataataaaactttaacatcctcgtgaggacatcattatgtctggagacatcctacaaacaccggacgcaccaaagccacagggcgcgctggataattattttaaaattaccgctcgtggcagtaccgttcgtcaggaagtactggctggcttaacgacctttctggccatggtttattccgttatcgtcgttccgggaatgctgggcaaagcaggttttcctcccgcagctgtgtttgttgccacctgtctggtcgcgggcttcggctcgttgctgatgggattatgggctaatttgccaatggcgattggttgcgcgatttccttgacggcgtttaccgcattcagtctggtactcgggcaacaaattagcgttcctgtcgcactgggcgcggtatttctgatgggcgtcatcttcaccgccatttccgtaaccggtgtgcgtacctggatcttacgtaatttgccgatgggtatcgctcacggtacaggtatcggtatcgggctgtttctgctgctgattgctgctaacggtgtgggtatggttatcaaaaacccgattgaaggcttgccagtggcgctcggtgcgtttacctccttcccggtgatgatgagcttgctggggctggcggtcatcttcggcctggagaagtgtcgcgtacccggcgggatcttgttggtgattattgcaatttcgatcatcggcttaatctttgacccagcggtgaaataccacggtctggtggcgatgccaagcctgactggcgaagatggtaagtctctgattttcagcctcgatattatgggtgcactccagccaactgtacttccgagtgtactggcattggtgatgaccgcagtgttcgacgctactggcaccatccgtgccgtcgccggtcaggcgaatttgttggataaagacaaccagatcatcaacggcggcaaagccctgaccagtgactcagtaagttcaatattctccggcctggtgggcgcagcgcccgcagcggtttatatcgaatcagcggcaggaaccgccgccgggggtaaaacaggtttaaccgcaaccgtagtgggggcgttattcctgttaattctgtttttatcaccgctgtcatttttgatccctggttacgccactgcacccgctctgatgtacgtaggtttgctgatgttaagtaacgtctcgaagctggatttcaatgattttattgacgctatggctggcctggtgtgtgccgtgttcatcgttctgacttgtaatatcgttaccggtattatgctgggctttgtgacactggtcgtaggccgcgtctttgcacgcgaatggcaaaagctgaatattggtacggtgatcattactgccgcactggtcgcattttacgcgggtggttgggcaatctaatagattctccgcgcctttcagcgcggagatttctttcagagaggattctcaccgctggcaacaatacgctgctggcggactcgcctgagttctctttcagtaagcaactgcagcgcctgtgttgggcaagattcaacgcaggctggcccctcttcccgctgttcacagagatcgcatttcacaatttgttgtcgggtatcccccggcaacgactgaatggtgatcattccaaacgggcacgcactgacgcaactctgacagccaatacaacgggcagaattggtctgcaccacctgctcgcccatcgtcagcgcccccacggggcaagcgccaacacaaggggcgttttcacactgatggcacatcaccggcgcactgatgctgtccagtcgctgtaccttcagccggggtaaaaagacatcggcattcaactcctgttctgaagggtgagcgaccacacaggctacttcacaagtacggcagccaatacagtcagccggattaacgataattaacgatttcatcacgatgccttcgtatcaaacagagttaacatatcgcgcgccgcctgccttcctgcggccattgcagtgacaaccagatccgcgccatgaactgcatcaccaccagcaaagacttttttcagatgcgtctgggtaggtaaatacccgacgtcaccggtttgaatcaggccccatttatcgagtttaattccgctgccctgcaaccacggcatggcatgcgcctggaaaccaaaggccataatcagaacatcggcgggcaattcaaactctgaacccgctaccggacgaggacgacggcgaccatccggccccggctcacccatggcggtacgaatcaggcccaccgcagttaaacgcccatcttcgtcacaagcgatatattgcggttgaacattgaactgaaactcgacaccttcctcgcgcgcattaaccacctctttgcgcgagcccggcatactgacttcatcacgacgatacgcgcaggtcacgctggcggcattgaggcggatggaagtccgcaaacaatccattgtcgtatcgccaccgcccaataccacgactcgcttaccttccacgtccgtcagcggatactcttcagactccggcaatcccatgagctggcgggtatgggcagtcaggaacggtagagcctgaatgacaccgggcgcatcttcatgcggcagatctgctcgcatcatcccgtaagtccccacgccgatgaaaactgcatcatattcagaagttaaatcgctaaaggtaatatcgcggccaatttcacagttaagatgaaagtcgattcccattgcggtgaatatctctcgccgctggcttaataccgttttatcgagtttgaaaggaggaatgccaaaagtcagcataccgccaatttctggatggcgatcaaagacatcgacctgaactcctgcgcgcgccagaatatcagcacaccctaaccctgcaggcccagcgccaatcaccgccactttttcgctacggggaacaactttgctgacatcgggacgccagcccatcgccagcgcggtatcggtgatgtagcgttccagattaccgatagagactgcgcccgagtgatctttcaaagtacatgcgccttcacaaagacggtcctgtggacataccctgccgcaaatttctggtaaggaactggtctggtggcaaagttctgccgcttcaataatctttccttcctgtaccagacggatgtaatccggaatagcgttatgcagcgggcaatgccagttgcagttagctttttcggcacaataaacacagcggtcactctcataagtcgcttgttgtggatccagcccgcaatatatttcgccaaagtgggttttccgttcactcgctgaaattttatctgcgcctttacgcgagttaacggggagcaacgctgcactgcgagatggctgagcgtctgatgacgcttttcctgctgccgttttgcgctggcgggccacctttatctgctgcaaccctttatcgtccatcagtcgtaacgcctgtgttgggcaaacttcaatacaggcttgcgtgccggaactgcgctggttacaaaggtcgcatttctgcgcaatcgtatcgaccatctcaacgacgccaaaggggcaagcgattgcgcatcttttacaaccaatacatttttgctcgtccagttgtacgctatcggactggaaagtcagagcattaaccggacaagccgtaacgcaaggggcattgttgcagtgatggcaggccaccggattcgcagcctggcctttccctacaacgtggatacgcggtcgaaagtcactgtgactcagcggccagttttcttgattgtgtgccaccgcacaggcaatttcacaagcatgacagcctatacattccgcagcttcagcagcaataaacttattcatttgcatccctttcatttaatgagttatgtcttctcaaatttcgcgatgcaataaacgggcatatattaggtagcatgaccgttttaattataattttgcgactgagttcaaattattgcccctcaatctatgccgctttcattatttcaacattgccgatcaaaagagcgctatccagataaaaacgattaaatgcgagagtgcgacatgccagaatgattaatgaaatatcaatatgagaaaattacagataattccattgtcaggttctcttctcattttcgtggtttaaccacgattatgtgattgcctccgcaattcctgtctctaactccccttcctcgcaaaaactggcactccacgagcatgtgtttagacagtttcattaacgtaaacggttgctttttactctggcgggcgaaaggagaaacactgatgagcgccatagattcccaacttccctcatcttctgggcaagaccgcccaactgatgaggttgaccgcatattatcaccaggaaagctgatcatactcggtctgcaacacgtccttgtcatgtacgcaggtgcagtcgctgttcctcttatgattggtgaccgactgggcctctcaaaagaagctattgcgatgctcattagctcggatctcttttgctgcgggatcgtcacattattgcaatgtatcggtatcggccgctttatggggatccgcctgccggtgattatgtcggtgacctttgctgctgtaacaccaatgatagccattgggatgaacccggatatcggcctgctggggatatttggtgccactatcgccgcgggttttatcaccacattattagcgccacttatcggtcgcttgatgcctttattcccgccactggttaccggtgtggttattacttctatcgggcttagcatcattcaggtgggtattgactgggccgccggaggtaaagggaatccgcaatatggtaatcccgtttatttaggtatctcctttgccgtcttaatttttatcttgctcattactcgctatgcgaaaggatttatgtccaacgtcgccgtattactggggattgtatttggctttttactttcgtggatgatgaatgaagtcaatttatccgggctacatgatgcttcatggtttgcgattgttacgccgatgtcgtttggtatgccgattttcgatcccgtttccattctgaccatgactgccgtgttaatcatcgtgtttatcgagtcaatggggatgttcctggcactgggtgaaatagtcggtcgtaaactctcttcgcacgatattattcgcgggctgcgtgtcgatggcgtagggacaatgataggcggcacgtttaacagcttcccccacacgtcattttctcaaaacgttggcctggttagcgtgacgcgcgttcatagccgctgggtgtgtatttcttcgggaattatattaatcctgtttggcatggtgccaaaaatggcggtgctggtagcctccattccgcaatttgtgctgggcggcgctggtctagtgatgttcggcatggtactggcgacagggattcgaattctgtcgcgctgtaactacaccaccaaccgttacaacctctatattgtggcgatcagtctcggcgttggcatgactccgacgctctctcacgatttcttttctaagttaccggccgtactgcaaccgctgctacatagcggcattatgctcgcaacccttagcgccgttgtgctgaacgtcttctttaatggctatcagcatcatgctgacctggtgaaggaatccgtctctgataaagatttaaaagtcaggacagtacgtatgtggcttctgatgcgcaagctgaagaaaaatgagcatggagaataatatgaattttttaatgcgcgctatattcagtctgttgttgctttttactctctctattcctgtcatttctgactgtgttgcaatggccattgaaagtcgcttcaaatatatgatgctacttttttaaatggtttttacctgtcggcatccgctcaaaacgggcggttgtcgataaacgctcacttggttaatcatttcactcttcaattatctataatgatgagtgatcagaattacatgtgagaaattatgcaaacggaacacgtcattttattgaatgcacagggagttcccacgggtacgctggaaaagtatgccgcacacacggcagacacccgcttacatctcgcgttctccagttggctgtttaatgccaaaggacaattattagttacccgccgcgcactgagcaaaaaagcatggcctggcgtgtggactaactcggtttgtgggcacccacaactgggagaaagcaacgaagacgcagtgatccgccgttgccgttatgagcttggcgtggaaattacgcctcctgaatctatctatcctgactttcgctaccgcgccaccgatccgagtggcattgtggaaaatgaagtgtgtccggtatttgccgcacgcaccactagtgcgttacagatcaatgatgatgaagtgatggattatcaatggtgtgatttagcagatgtattacacggtattgatgccacgccgtgggcgttcagtccgtggatggtgatgcaggcgacaaatcgcgaagccagaaaacgattatctgcatttacccagcttaaataaaaaaaccccgacatttgccggggttgtgagcataacgtaatgcttattttaccggacgcatcgccgggaacagaataacgtcgcggatggtatggctgttggtgaacagcattaccatacggtcgataccaattcccagacctgctgtcggcggtaagccatgttccagtgcggtgacgtaatcttcatcgtagaacatcgcttcgtcgtcacctgcgtctttcgcggcaacctgatccaggaagcgttgcgcctgatcttccgcgtcattcagctcgctaaagccgttaccgatttcacgaccaccaatgaagaactcaaagcggtctgtgatttccgggttaacgtcgttacgacgcgccagcggagaaacttctgccggatattcagtaatgaaggtcggctgaatcagatgtgcttctgccacttcttcgaagatctcggtaacgatacggcccagaccccagctcttctcaacgtggatgccgatagattcagcaattgctttcgcagagtcgaagttgtccagatccgccatgtcggtttccgggcgatatttcttgatcgcttcacgcatggtcagtttttcgaacggtttaccgaagtccagcgtcacgtcgccgtaggtcacttccgtcttaccgagaatatcctgtgccagagtacggaacagcgattcggtcagctcgatcagatctttgtaatctgcgtaagccatgtagagttccatcatggtgaactctgggttatgacgtacggaaataccttcgttacggaagttacggttgatttcgaatacacgctcgaagccaccaaccaccagacgcttgaggtacagttccggcgcgatacgcaggtacatgtcgagatccagcgcgttatggtgggtgataaacggacgcgcagcggcaccgccagggatcacctgcatcatcggcgtttcaacttccataaagccgcggttcaccatgaactggcgaataccagagaggatctgcgagcgcactttaaaggtgttgcgggattcatcgttggagatgagatcgagataacgctgacgatagcgcgcttcctgatcctgcaagccgtggaatttatccggcagcggacgcagtgctttggtcagcagacgcaactcggtgcagtggatagacagttcgccggttttggttttgaacagcttacctttcgcgccgaggatgtcgccgaggtcccattttttgaactgctcgttataaacgccttccgggagatcgtcacgggcaacgtacagctgaatgcgaccgccaacgtcctgcagggtaacgaaagacgctttacccataatacgacgggtcatcatgcggccagcaacggcgacttcgatgttcagcgcttccagttcttcgttctctttgccgtcgaattctgcgtgcaattggtcagaggtatgatcgcgacggaaatcgttcgggaaggcaatcccctgctcgcgcaggttcgccagcttctcacgacgcgttttcagttcattgttaagatcgactaccgcgtcagcgccctgtgcgtgttgttcagacatgttggttcctcataaccctgctttcaaacttgcttcgataaattgatccaggctgccgtccagcacggcctgcgtgttgcgggtttctaccccggtgcgcagatctttaatgcgggagtcatcaaggacataagaacgaatctggctgccccagccgatgtcggatttgttatcttccatcgcctgtttctcggcatttttcttctgcatctccagttcataaagcttcgctttcatctgcttcatggcctgatctttgttcttgtgctgggaacggtcgttctggcactgggtcacgatcccggtcgggatgtgggtaatacgcaccgcagattcggtacggttaacgtgctgaccgcccgcgccggacgtgcgataaacgtcaatgcgcagatccgccgggttgatttcgatatcaatatcatcatcaacttccggataaacaaacgcggagctgaacgacgtgtggcgacgaccgccggagtcaaacgggcttttacgcaccaggcggtgaacgccggtttctgtacgcagccagccgtaagcgtaatcgccggagattttgatcgtcacggatttaatacccgccacttcaccttccgactcttcgatgatttcagttttgaaaccacgcgattctgcccagcgcagatacatacgctcaagcatgctcgcccagtcctgtgcttccgtaccgccagaccccgcctgaatatcgaggtagcagtcggcgctgtcatattcgccagagaacatacggcggaactcaagctgcgccagtttttcttccagggcgtcgagttcagcaacggcttcgttaaaggtttcttcgtcgtcagcttctacagccagttccagcagaccagaaacatcttccagcccctgtttcatttggtcgagggtgtcgacaacggcttcgagggaggaacgctctttacccagcgcctgtgcgcgttcgggttcgttccagacatccggctgttccagctcggcgtttacttcttccagacgctctttcttggcgtcgtagtcaaagataccccctaagaacgtcggagcgttccgtgaggtcctgaatgcgattatttaccggattaatttcaaacatggtctgatttcttttattgagctagtcaaaatgcggtgataagagcgggattgtacccaatccacgctcttttttatagagaagatgacgctaaattggccagatattgtcgatgataatttgcaggctgcggttgccgcgaaactcgttgatatcgagcttataagccagttgcacttcgcgcacgccgttatccggccagagggcggtatcgacattaaaagcaataccatccagcagtggaccgccgccgaccggttcgaccatcaccttcaaatgacgttcgcccaccagccgctgttgcagcagacggaaatgaccgtcaaacagcggctccgggaacatctgcccccacgggccagcatcgcgcagcagctgcgccacttccatggtcatttcggccgggcttaacggaccgtctgataccacttcgccttgcaatagcgaagggtccagccactcagtaaccagttcgccaaaccgttgttgaaagagtttgaatttatcctcttccagcgacaaacccgccgccatcgcatgaccgccaaacttcagcatcatgccagggtagagtgtgtctaatcgctccagcgcatcacgcatatgcagcccctgaatggagcgaccggaacctttcagcgtaccgtcacctgctggcgcaaacgcgataaccggacggtgaaaacgctctttgatgcgcgaagccagaataccgacaacgccctgatgccattcggggtgatacattgccagcccgccgggtagcgtgtcacggctgcgctccagtttctcgcacagggtcagggcttcaatttgcattccttgttcgatctcttttcgcgtctggtttagcgcatcgagttcatttgccagcacgcgcgcttcgccgatgttgtcgcacaacaacagcgccacaccgacggacatatcgtccagtcgtccggcagcattgagacgtggccccagcgcaaaacctaaatcgctggcggcgagtttttgtgcatcacggtttgccacttcaagcagcgctttaatccccggacggcactttccggctcggatgcgactcatcccctgccaggtcagaatgcgattattagcgtccagcggcacgacgtccgccactgtccccagcgcgaccagatccagcagttctgccaggttaggaattgcgatgttacgctcatcaaaccagccctgatcgcgcaaaaaggtgcgcagcgccagcatcagataaaacgccacacccacgcctgccagtgatttcgacgggaaattacagtcgcgcaagttagggttaatgatcgcttccgctgcgggtaatgtgtcgcctggcaaatggtgatcggtaacaataaccgggatgcccaacgagcgagcgtgctcaacccccgcatgggaggaaataccgttatccaccgtgacaattaactgcgcgccacgggcatgggcctgatcgaccacttccgggcttaagccgtaaccgtcttcgaaacggtttggtaccaggtagtcgatattgctgcaaccaagcgagcgcatcgccagcacgcttagagccgtgctggtcgcgccgtcggcgtcgaaatcaccgaccacaataatccgcgttccttcgcgaaaagcgttgtaaaggatctcaacggccttttcgacgccgctcagttgctgccagggcagcatacctttaacactgcgttccagttcttgcgcactgcgtactccccggctggcgtataaacggcgcagcaagggaggcaattcagcgggcaagtctgccgtttcatcgacttcacggcgacgaagttgtatctgttgtttcacgcgaattatttaccgctggtcattttttggtgttcgtcgaggaattctttcatctctttcggcggctggtaacccggaacaagtgtgccattgctcagcacaactgccggagtaccgctaacgccaagctggacgccaagtgcgtaatggtcggcaatatccacgtcgcaactggctggtgcgacgcttttacctgccatcacatcatcaaacgctttgtttttatctttcgcacaccagatagctttcatttctttctctgcatcgctgtccagcccctggcgcgggaaagcaagataacgcacggtgatccccagcgcgttgtagtctgccatttgctcatgcagtttgtggcagtaaccacaggtaatatcagtaaacacggtgatgacgtgtttttcctgcggcgctttataaacgatcatctctttttcaagcgcattcaactgctttaacagcatcttattggtgacattgaccggagccgtgccactaacgtcatacattggcccctgaatgatatgtttaccatcatcggtgatgtacaacacgccgctgttagtcagaactgtcttcatgccagctacaggcgcgggctgaatatcgctgcttttgatgcccattttggctaacgtttgttgaattgccgcgtcatcagcctgagcaaagcctgaaaacgccgctaacaaagtaaacaacataaaacctttcttcataaatcttcccgttcttttcagacatcacgcccgcgggtgatgctgttgatgaagttgccgcagacgctcggtagcgacatgcgtataaatttgcgtggtggagagatcgctgtggcccagtagcatctgcaccacgcgtaaatccgcaccatgatttaataaatgagtggcaaaagcgtgacgcaacacatgcggtgacagcttttcgctgtcgatacccgccagcacagcataatgtttaatacggtgccagaaggtctgtcgcgtcatctgctgcgcacgctggctgggaaacaacacgtcaattgacacaccattcagcagccacggacgcccatgttccagataggtttccagccagtaaaccgcctcttcacctaacggcaccagacgctctttgttgcctttaccaatgacccgtaccacgccctgacgcaggctgatatcactcattgtcagtccgaccagttcagagacacgcagcccggtagcatacaacacttcaagcatggctttatcgcgtagctccagtggctgatcgattaatggtgcctgtaataaacgttcgacctgcgcttcgcttaaatcttttggcaaacgctggggcaatttcggtgaagcgagatgcgcactgggatcgtcttcacgaaacttttcgcgataaagatactggaacaatcggcgcactgcactcagcaaacgcgctgagctggtggctttatacccgccctccagccgttctgccagtaatgcctgcaaatcgtcactttgcgccgtcgccagcgtcaacccgcggtgatgcaaccactccaccatcattgacagatcgcgacggtaagcgttcaacgtattttcagccagatttttttccagccacagagcatcaagaaactgctcgatgcgtgccagatcctgtttcacttgcgccccttatggtcactcatttgatccattatgccttattgtgccgtgactaaagcgattctgatacactagccgcaaaagccacagcagaatcgagaagcttacgttatgaatatgggtcttttttacggttccagcacctgttacaccgaaatggcggcagaaaaaatccgcgatattatcggcccagaactggtgaccttacataacctcaaggacgactccccgaaattaatggagcagtacgatgtgctcattctgggtatcccgacctgggattttggtgaaatccaggaagactgggaagccgtctgggatcagctcgacgacctgaaccttgaaggtaaaattgttgcgctgtatgggcttggcgatcaactgggatacggcgagtggttcctcgatgcgctcggtatgctgcatgacaaactctcgaccaaaggcgtgaagttcgtcggctactggccaacggaaggatatgaatttaccagcccgaaaccggtgattgctgacgggcaactgttcgtgggtctggcgctggatgaaactaaccagtatgaccttagcgacgagcgtattcagagctggtgcgagcaaatcctcaacgaaatggcagagcattacgcctgatctcactgacggcttagcgcatatgctttgccgtcatctttatctttgcgtctcttgttgcaacaaaatccgccgtaaatcccgccattcagcttcgtccatgctgtcggctgccagccataaatgttgccgtttaccgccatcagaacgtaaacgcagcatcatgccgctcttaatcatccacggtgctttgacgatgctccactcctgcccttgccaacgcaaacgcccgtccatcaacaagcgaatttccccctggcgagcattaatacgccgctggctgcgaacgcaatcaaacaccaccagcgaaagtaacaccatccataacggggtgtaactgagtggccagggcatgagtaaaataacagcggcaaccagcccatgaatcagcaaggaaagccactgtgcgcgccaggagacgcgcaaatcagattgccacaggaccacgttcccggttccgtgtctggatgagtcggaccatcatttccagttctgcatcggccggtttaccgtgattcatcagccagttaaacaggtccggatcgtcacattccagcagacgaataaagatgcgtttttcgtcatcgcttaagctgtcgtactcatgttcgaaaaacggcatgattgaaatatcgagttcgcgcataccacggcggcatgcccaatgaatgcgggctttgttgttaatgtccatcttcttcctgtctcacgaaaatccagtacccggctattgtaacgtgtttttcgccttcttttacgggaatatcagtaaacaccatcgcgatcgcgaaattaattcacaacaattcaatggcttcatttttttggaagtcgcctcgcagaaggcacagatcgcgtagtgaaagcacttgcattgcctcatagctcttttaccattagtcattaatacgccgttaagcaactcaggactctattatggcttttacaccttttcctccccgtcagcctacggcttctgcccgtttaccgctgacgctgatgacgcttgatgactgggcgcttgccaccattactggcgcggacagcgaaaaatatatgcagggtcaggtgacagcagatgtcagccagatggcagaagatcagcacctgctcgccgcccattgcgacgccaaaggtaaaatgtggagcaatttacgtctgttccgcgacggcgatggctttgcatggattgaacggcgcagcgtgcgtgaaccgcagctgactgaactgaaaaaatatgcggtattctctaaagtgaccatcgcgccagacgacgagcgtgtgctgcttggtgttgccggttttcaggcgcgcgccgcgctggcaaatctctttagcgaactgccttcgaaagaaaaacaggtagtcaaagaaggcgcgaccactttgctatggtttgaacacccggcagaacgtttcctgatcgtaaccgatgaagctactgctaatatgctgaccgataaactgcgcggtgaagcggaactgaacaatagccaacagtggctggcattaaacattgaagcgggtttcccggtgattgatgccgccaacagcgggcagtttatcccacaggcgaccaatctccaggcgctgggcggtatcagctttaagaaaggctgttataccggacaagagatggtggcgcgagcaaaattccgtggtgccaataaacgtgcgctctggttgctggcaggtagcgccagccgactgccggaagctggtgaagacttagagctgaaaatgggcgagaactggcgtcgtaccggtacggtactggctgcggtaaaactggaagatggtcaggtcgtggtacaggtcgtcatgaataacgatatggaaccggatagcatcttccgcgtacgcgacgatgcgaatacattgcatatcgagccgctgccgtattcgctcgaagagtaaatctctttatcgcatcaggcatttatcgcctgatgcgacgctggcgcgtcttatcatgtctgggatttgatgcctttatcacaacagggacgaggcccgtagatcggataaggcgttcacgccgaatccggcagttgtgctccgatgcctgatgcgacgctggcgcgtcttatcaggcctacaaaggcatacccattacgcctgcccaatatacaaatagatcgccagaaagtggcacacactaccgccgagcacgaagccgtgccagatggcatggttgtatggaatgcgtttgcagacgtagaaaatcaccccgagcgaataaaccacgccgcctaccgccagtaaggtaacgctgcccgccgcgagcttaactgccatttcataaattaccaccagcgacagccagcccatcgccagataggtcaccagagataaaattttgaatcggtgcgcgatggtcagtttaaacagaatacccagcaatgccaggctccagataacaatcatcaacccgcgcgctaacggagaatccagccccaccagcaaaaacggcgtgtaggttccggcaatcaacaggtaaatagcgcaatggtcaaatttcttcagccacatttttgcccgttgatgaggaatggcgtgatagagcgtcgaagcgaggaacagcaggatcatactgccgccatagaggctgtagctggttatcgctgtggcgctggcattaagatccaccgcctgaaccagtagcaacaccagcccaacgataccaaacaccaacccaatgccgtgactgacgctgttggctatttcctctgccagtgaatatccctgcttaatgaggggcttctgaaccataacttactccggagaaacgtacacgcacatgtatacctctccagcgtaactgagaatagttccagtgaacacctgttagctaaaataaattctgatttgagactaatctcctaaaaatcatgaaattaaatgcgaaatttcaactaacaggcgtgagttcaatttaaagacatttaaattcaatcacataaaattgtgtctgaccgggatagatgtcagcaatgacttttttcagttcagtcagggtcatattttcctgctctgcatgtttttcagtcagcgtatccagcgttacggttgaggttgcggtgacttcaatcgtgcaaaaataaccgtcatcttcaaaacgtccgacacgaagcacatcacccgttttgaagtgcgattcagactcgtcgcggatggtgatggttttacgcccagccagaatgtcatcctggaaacgttgaaaaaaagtgatgtcgtttggctgcatggtactatttcctgtaagaattgactcatctggagcctatgatagtgaaaaaactcaccttaccgaaagatttcttatggggcggcgcagttgccgctcatcaggtcgaaggcggctggaacaaaggcggaaaagggccgagcatttgtgacgttctgaccggtggcgcacacggcgtgccgcgcgaaatcaccaaagaagtcttgccaggaaaatactatccaaaccatgaagccgttgatttttatggtcactataaggaagacatcaagctatttgccgaaatgggcttcaaatgttttcgtacatccattgcctggacgcgcatttttccaaaaggcgatgaagctcagccaaacgaagaagggctgaagttctacgatgatatgttcgatgaactgctgaaatacaacatcgaaccggtgatcaccctctcccactttgaaatgccgctgcatctggtgcagcaatacggtagctggaccaaccgtaaagtggttgatttctttgtacgtttcgcggaagtggtatttgaacgctataagcacaaagtcaaatactggatgaccttcaacgaaattaacaaccagcgtaactggcgtgcaccgctgttcggttactgctgctccggcgtggtgtataccgagcatgaaaacccggaagagacgatgtatcaggtgctgcatcaccagtttgtcgccagcgccctggcggtgaaagctgcgcgtcgcattaacccggagatgaaagtcggctgtatgctggcgatggtgccgctctatccttactcctgtaacccggacgatgtgatgttcgctcaggagtcgatgcgcgaacgctacgtctttaccgatgtgcagctacgcggctattacccgtcctatgtgttgaacgagtgggagcgtcgcggatttaacatcaaaatggaagacggcgatctggatgtgctgcgtgaaggcacctgcgattatcttggtttcagctattacatgaccaatgcagtgaaggccgaaggcggcaccggcgatgcgatctctggttttgaaggcagcgtaccaaacccgtatgttaaagcatctgactggggctggcagattgatccagtaggtctgcgctatgcactttgcgaactgtatgagcgttatcagaggccgctgtttattgtcgaaaacggttttggcgcttacgacaaagtggaagaagatggcagcatcaacgacgactaccgcattgactacctgcgcgcccatatcgaagagatgaaaaaagcggtgacttacgatggcgtggatctgatgggctacacaccgtggggctgcatcgactgcgtgtcgttcaccaccgggcagtacagcaaacgctacggctttatctatgtgaataaacatgacgacggtactggcgatatgtcgcgttcacgtaagaagagctttaactggtacaaagaggtgattgccagcaacggcgagaagctttaagtcgatgaagtaccggatgcaatacttgttgcatccggtcagacaacttccctgttttatttcccgcccgccaaatcgataaaacttcccgtgacgtaagaggctttatcacttagtagccagacaatggcctgcgcgacctcttctgcctgtccaccacgctgcatggggatgttcgacttaacgcgatcgacgcgtccaggctcgccgccgctggcgtgcatttcggtataaataaaccctggccgcacgcagttaacgcggatcccctgcgcggcgacttccagcgatagtccggtggttaacgtatcaatcgcccctttcgatgccgcgtaatcaacatattcccctggcgaacccaaccgtgaggccaccgaagagacattgacgatagcgccgccactgccaccatttttaagcgccatgcgttttaccgcctcgcggcagcagagaaaatatcccgtcacgttggtggaaagtactcggttgattcgctctgcggtaaggttttcaacggtgcactgggtaaacaagatcccggcgttattgaccagcgctgctagcggttcatcgtgctgatcgattgctgtaaacatcgcaacgacctggttttcgtcgctgatatccgcctggagcacgaatgctttgccaccggcttgcgttattaagttcatcacttcctgcgccgcgtggaggttttgctgataattaaccgccaccgtatacccttcttgcgccaacagtaatgcagttgcccgcccgatgccgcgactgccaccagtcacaagtgctatagccatttgtttttccgagaaaaattaattcgttgacgtatctttgagattgctaacaaactggctcaatcttcaatgttggcacgcttttccccctcgccctttcagggagagggccggggtgagggtaaatattcgcgccagtgccggcctgttcccctcaccctaaccctctccccaaaggggcgaggggactgtctgagcacttttgtactttgtcatctgactaaaaaggcgccgaagcgcctttagaaaatagtcgaatcagtgaattactggtattcgctaatcggtacgcaggagcagaacaggttacggtcgccgtaaacatcatccagacgtttcactgtcggccagtatttgtctgccacacctgccgggaataccgcaacttcacggctgtacggatgcgcccactcggcgaccagttcgctctgaatgtgcggcgcgttcaccagcgggttatcttccagcggccagacaccggctttcacctggtcaatttctgcgcggatagccagcatcgcgtcgataaagcgatccagttccactttgctttcagattcagtcggttcaaccatcagcgtacccgccaccgggaacgacatcgtcggcgcgtggaaaccgtagtcgatcaggcgcttggcaatatccagctcgctgatgccggtttcttctttcagcgggcgaatatcgagaatacattcgtgcgccacgcgaccgtcgcgaccggtatacagcaccgggaaggcatcctgcaggcggctggcaatatagttggcgttgaggattgccacctggcttgcttttttcagcccttctgcgcccatcatgcggatgtacatccagctgattggcaggatagaggcgctaccgaacggtgccgcagaaaccgcgccctgacgggttaacatgccttcgatttgcaccacgctatgacccggtacaaacggtgccaaatgcgctttcacgccgatcggtcccatacccggaccaccaccgccgtgcggaatgcagaaagttttatgtaggttaaggtgtgaaacgtccgcaccaataaagcccggcgaggtgatgccaacctgggcgttcatgttcgcgccatcaaggtaaacctgaccgccgaactgatgcacgacttcacacacttcacggatcgtttcttcatacacgccgtgggtagaaggataagtcaccatgatacaggagaggttatcgcccgcctgttccgctttcgcgcgcagatcagtcagatcgatgttgccgtttttatcacacgccacaaccaccacctgcattcctgccatatgtgcagaagcggggttagttccgtgcgcagaagccgggatcaggcagatatcgcgatgcccttcgttgcggctttcatgataatgacgaatcgccagcaggcccgcgtattcgccctgtgcgccagagttcggctgcatacaaacggcgtcgtaaccggtcagtttcaccagccagtcagccagctgcgcaatcatctgctgataaccttcggcctgctccggcgggcagaacgggtgcagttcggcaaattccggccaggtgattgggatcatctcggcggcggcgttcagtttcatggtgcaggaacccagcgggatcatcgcctgattcagcgccagatctttacgctccagcgagtgcatatagcgcatcatttcggtttcgctgtggtagcgattaaacaccggatgggtgaggatttcgtcgtcgcgcagcatcgcaggctggatagagcggctgtcgtgagccacgtctttgtccagcgtgtcgatgtccaggccgtggttatcgcccagcagcacgttgaaaagctgcattacgttttcacgcgtggttgtttcatcaagggtgatcccaaccgcgttcagaatatcgctacgcaggttgatttcagccgcttcggcacgcgtcagtacgcccgctttgtcggccacttccacacacaaggtgtcgaaatagtgcgcatggcgcagtttcagacctttttgttgcaggcccgccgccaggatatcggtcagacggtgaatgcggttagcgatacgtttcaggccaaccgggccgtgataaacggcatacaggctggcgatgtttgccagcagtacctgggaagtacaaatgttggagttcgctttctcacggcggatatgttgctcgcgagtctgcatcgccatgcgcagcgcggtattgccagctgcatctttcgatacaccgataatacggcccggcattgagcgtttgtattcatctttcgccgcaaagaatgccgcgtgtgggccaccgtagcccatcggcacgccgaagcgttgcgccgaaccaaaaacaatatccgcgccctgtttacccggcgcagttaacagcaccagcgccataatatcggcggcaacgctgaccacaattttgcgtgatttcagttcgctaataagcgcagtgtagtcgtgaatttcaccggtagtgcctacctgctgtaacagcacgccgaagacgtcctgatggtcgagcactttttgcgcgtcatcgacaatcacttcaaaaccaaaggtttcggcacgagtacggaccacatccagcgtttgcggatgcacatcggaagccacgaagaagcggttggcatttttcagtttgctgacgcgtttcgccatcgccattgcttcggcggcagcggtggcctcgtccagaagagaagcagaggccatatccagtccagtcaaatccagcgttacctgctggaagttgagcagtgcttcaaggcggccctgggagacttcaggttgatacggagtgtacgcggtataccagcccggattttccagcatgttacgcaggataaccggcggtagctgcacggcggtgtaacccatgccgatgtaagacgtgaagcgtttattgcgactggcaatagccttgagttctgccagtgcggcgtattcggtcgccggtgcgccaacctgcggtggtgtcgcaagttgaatatctttcggcacaatctggccggtcagcgcgtttaacgattgtgcaccaacggcattcagcatttcttgctgttgcgcggcgtccggtccgatatggcgttcaataaaagcgccgctgttttcaagctggcttaacgtctgtgtcatgagcgatggttcctgaaacgtgcagtgaattgtgaacctctctccttacgaagagagtgagggtgaggcataaattttcctcaccctgatcctctcccgcagaagaggaataaagccgttactcgtcttctaacaatgcttcgtatgcggtcgcatccagcagtgattccagttcgctttcatcgctggctttgattttaaagatccagccgcctgcatacggttcgctgttcaccagttccggggaatcgctcagtgcgtcgtttaccgccacgatttcaccgcttactggcgcataaatgtctgacgccgcttttaccgattcggcaaccgcgcagtcatcgcccgcgctaaccgttgcgcccacttccggcaggtcaacaaacaccatatcgcctaacagctcctgagcatgttcggtaataccaacggtgtaagtgccgtcggcttctttacgcagccattcgtgttctttgctgtatttcagttctgctggtacgttgctcatcaatcaatctccaaaaaagtaaatcacgcgacggctttgccgttacgcacaaaaacaggttttgtcactttaaccggcatttcacggttgcgaatttgcacaatcgccgtttcgccaataccttccggcacgcgcgccagcgcaatgctgtaacccagcgtcggggagaaagtaccgctggtgataatgccttcatgctggttgccctgcgcatcggtaaagcgtaccggcagttcattacgcagcacgcctttttcggtcatcaccagaccaaccagtttttctgtaccatgctcacgctgcacttccagggcttcacgaccgataaagtcacgatctgccggttcccaggcgatggtccagcccatgttggcggctaaaggagagatggtttcgtccatctcctgaccataaagattcatgcccgcttccagacgcagcgtgtcacgcgcgcccaagccacatggcttaacacccgcttccaccagcgcacgccagaaatcggccgctttttcattgggcagcgcaatttcatagcccgcttcaccggtataaccagtggtggcaataaacagatcgcccgcctgcacgccaaagaacggtttcatcccttccaccgcctgacgctgggcgtcattaaacagtgtggcagcttttgcctgcgcattcggcccttgcacggcaatcatggaaaggtcatcacgaacggtaatttcgatgccgaaaggttcagcgtgttgggtaatccaggagaggtctttttcgcgggtggcggagttaacaacgaggcggaagaaatcttcagtaaagtagtagacgatgaggtcatctatcacaccgccagaggcattcaacatccccgagtaaagggctttgccgcttttggtgagcttcgccacatcgttcgccagcagataacgcagaaactcccgggtgcggctgccgcgaagatcgacgatggtcatatgtgacacatcaaacattccggcatcggtacgtaccgcatgatgttcgtcgatttgcgaaccgtaatgcagcggcatcatccagccgtggaaatccaccatgcgagcgccgcaaagcgtgtgttgttcgtacaaaggagtctgttgtgccatcttgtcctcattgaataagcggggctgacaactttttcatggtgaaattatcaccacgaaacccagcatcggagccactcccggtccccaacgcaatcgttctcttttgcctgaacttaccaccgaaacagactgttaaccataaggtaaaattgatcatcacattagcttatggttaaaaaatgcaaaaatcgcgacagaataaaaaaccaaaaaatacaccagtttctatacaaagatgatgtgatgagaaagtcaatttgaataagacaatattaagagctaaaaaaatgtcaaaaaacactaaatcaaaaaataatggcattagaaaatataatgcgaaaacggaggtgaaattagtttatttcaaatgaggaaaatctcccggcgaaaaaaccgggagatgaaagtgtgatgggtatcaaataaacaacagaggagaaatttttaacgcagccattcaggcaaatcgtttaatcccattgcctggcggataagttgcggcttaacgccaggaagcgtgtcggccagtttcaaaccaatatcacgcagcagttttttcgccggattggtaccggaaaacagatcgcggaatccctgcataccagccagcatcaacgccgcactgtgcttgcggctacgctcatagcgacgcagataaatgtactgcccgatgtctttcccctgacgatgcaaccgtttcagttcggcaatcagctctgcagcatccataaagccgagatttaccccctgccccgccagcgggtgaatggtatgtgcggcgtcgcccaccagcgccagacggtgcgaggcaaactggcgcgcataacgccccgtcagtgggaacacctgacgcgcgctctcaaccttgcataagcccaggcgattatcaaaagcgatatttaacgcgcgattaaattcgtcttcacttgcctgctgcatccgctgcgcttcctctggcgacagtgaccagacaatcgagcaaagatgcggatcgctaagcggtaaaaaggccagaatgccttcgccatggaaaacctgccgcgccaccgcatcatgcggttcttccgtgcgaatggtcgctaccagcgcgtgatgctgataatcccagaaagtcagcggaatatcggctttgttgcgcaaccaggaattagcgccgtccgcgccaatcaccagacgcgccgttaacatgctgccatctttcagcgtcaggaaggtttcattttctccccaggcgacctgctgtaattctgcgggggctaacagagtgatatctgacgactgatgcgctttgttccacagcgcgtagtgaatcactgaattttcaacgatatgcccaagatggctatagcccatgctttgatcgtcaaacgaaatgtgaccaaagctgtctttgtcccacacttccataccgtgataacagctggccctacgagagagaatgtcctgccagacgccaagacgggtgagtaatttttcgctggcggcattgatagccgaaacgcgcagttgtggtggtgcattcgccgccagaggttcctgtacgcgctgctccagtacggcaacgcgtaagccgctcccctgtaagccacaggcaaccgccagccccaccatgccgccgccaacaatggctacatcaacactttgcattgtttattccttaaaaccgccttcaacgcgccacccaaccgagggtgcgctgcgccagcacatcgcgtgccggggtgaataattccatcgtcatcagcccgatgttgcgcccgacaaccagcggtgcccaacggttggcaaaaagatgtacaaggctgtccgtgacgccaatggttgcttcgcgatcgctctgtcgacgctgctgataacggcacaatacgccgtaatcccccatgtcttctccgcgctcctgcgcctgagtcagggtttccgcaagactcatcacatctcgcataccgaggttaaacccttgcccggcaatcgggtgcagagtttgcgccgcattgcccaccagcacggtacgatgggtaatagatctggcggcgtgggttaacgccagcggataagcactgcgtttaccagcgtgggtaattttcccaagtcgccagccaaaggccgactggagttcacggcaaaacttctcgtcactccacgacaacacctcttcgcgccgttccagtggatgacaccagaccagcgaacagcgtccgtcagacatcggcaacatcgccagcgggccatgttgcgtaaagcgttcaaaagcgcgcccttcatgcgcaacggaagtagcaacgttggcaatcacggccagttgttcgtaaggctcctgctgccagtcaacgccgcacgcggtggctaacgctgaatgggtgccatcagctgctaccagcacgcggcccgtcagcgtctcgccactctccagcgtcacttcaacgtgactctgagtacgggcaacgttagccacgcgatcagggcaatgcagcgttacgccaggtgctttacgcagcaatgcaaacagccgttgcccgacattgtgcaattcgacaacctgtcccagcgccgccagttggtaatcttctgcggcgagggtgacaaatccagcgtgaccacgatcgctgacatgcacggtggtgatggcagttgcgcaatccgccagagattgccagacgccgatgcgcgccagttgctgacaggtacccgccgccagcgctatcgctcgtccatcaaagcccggatgagcatgtgactctggcgcagtcgcttcaatcaaatgtaccggcagcgccccgtgacttaaccgggaaatagccagcgccagcgtcgcgcccgccatgccgccaccgacgatgattacgctcattgctttctcgcagcaaccatcaacgcttcgatttcttccggctttttcaccacgctggcggtgaggttttcgttaccggtttcggtaatcacaatgtcgtcttcaatacgaatgccgataccgcgatattgttctggcacttctgcatccggcgcaatatacagccctggctctacggtcagtaccatgcccggttccagaatgcgcgagcgatcctgaccataaacacccacgtcatggacatccagtcctaaccagtggctaaggccatgcataaagaaaggacgatgggcgttctgagcgatcagttcatcaacatcacctttcaggatgccgagttttaccaggccgctaaccatgatgcgcaccacttcaccagtgacttccagaatggaagttcccggacgatacaggcgcaggctggtttcgagagactccagcacaatgtcgtagatttcacgctgggcctgggtgaatttgccgttgaccgggaaggtgcgggtaatatcgccagcgtaacctttgtattcacaacccgcgtcaatcaacaccaggtcgccgtcgcgcatttcacactcgttttcggtgtagtgcagaatgcagccgttttcaccgctgccgacaatggtgttataggacggatagcgcgcaccgtggcggttaaattcgtggtgaatttcgccttccagatggtactcgaacattcccggacggcatttttccatcgcccgtgtatgtgccatggcggtgatttctcccgcgcggcggagtacggcaatctcttctggcgatttgaacaggcgcatttcatgaacaacaggacgccagtcgatcatcgttgccggtgcggtgagattttgccgcgaacctttacgcagtttttccagcgcactgttcacgattacatcagcatatgcatattcgccctgggcatggtaaaccacatccaggccgttaagtagttgataaagttgctgattgatttcgctgaatgccagtgcgcggtcaacgcccagtttctctggcgcggcatcctggcctaagcgacggccaaaccagatctccgccgtcaggtcgcgaacgcggttaaacagaacgctgtggttatgagtgtcatcgcttttaatcagcaccagcaccgcttccggttcgttaaagccggtgaagtaccagaagtcactgttctgacgataggggtattcgctgtcggcgctacgtgttacttctggtgcagcaaaaatcagcgcggcgctgccgggttgcatttgctccaccagggcctgacggcgacgctgaaactcttgccgggatatctcactcataacactctccttacgttttttgtttttagtgtagagtcggtttttgtacttctggcgcggtcggttgcggatgagtaaaggtgtcgtggcataacagcgcggcaacacgaacgtattcgatgatctcttcaagcgacatttcaagctcttcctgatcttcgtcttcgtcgtaacccagttgcgcaatgttacgcagatcgtcgatagcttcaccggtttcgccggtcactttatccagcttcggttgcgtaacgccaagaccaagcaggaagtgattgacccaacctgccaatgcatcagcccgatcgaaaacgctgacatcatcgccatcaggcagataaagctgaaaaaggaagccgtcatcctgcagggcatcgctggtggcagagtgcattttacgcagtgcctgtgccagctcatgaccgaaagccatgccttcgttcgtcaggtcgtgaagtagcggtagccatgagctgtcatcgttaccgccacatatcatcccgctgattaaaccatgcatctcagctggggtcagacccgtcccttgttggttcagatactggttcatttcgttgtaaccaggcatttcgttctgtatagacataagcattcgtcgtcaaagggaggaatattcatgatatgctaccactttgggccctggtggaccagaaaagggcttgtctcttctcatcagggtagctatagtgtcgccccttcgcagaccatgggtctaaagacgaaggcagcgcagtcaatcagcaggaaggtggcatgtctgcacaacccgtcgatatccaaatttttggccgttcactgcgtgtgaactgcccgcctgaccaaagggatgcgttgaatcaggcagcggacgatctgaaccaacggttgcaagatctgaaagaacgcactagagtcacaaatactgaacagttggtcttcattgccgcattgaatatcagctatgagttagcgcaagaaaaagcaaagactcgtgactacgcggcaagtatggaacagcgtattcggatgctgcagcagaccatagaacaagcgttacttgaacaaggtcgcatcaccgaaaaaactaaccaaaactttgaatgacacttttcggtttactgtggtagagtaaccgtgaagacaaaatttctctgagatgttcgcaagcgggccagtcccctgagccgatatttcataccacaagaatgtggcgctccgcggttggtgagcatgctcggtccgtccgagaagccttaaaactgcgacgacacattcaccttgaaccaagggttcaagggttacagcctgcggcggcatctcggagattcccttcttatctggcaccagccatgacgcaactaccagaactcccactgacattatcccgacaagaaatccgcaaaatgattcggcaacgtcgtcgtgcgttaacgccggaacaacagcaggaaatgggtcaacaagccgctacccggatgatgacttatcccccggtggtgatggcacatacggtcgctgtattcctctcttttgatggcgaactcgacacccagccactcatagaacaactctggcgcgccggtaagcgcgtatatcttccagttttgcatccctttagtgccggtaatttgctgttcctgaattaccatccgcaaagcgaactggtgatgaacaggttgaagatccatgagccaaaattggatgtgcgtgacgtgctacccctttcccgattagacgtgctgatcacaccgctggtcgcctttgatgagtacggtcagcgcctgggaatgggcggtggtttttatgatcggaccttacaaaactggcagcactataaaacgcaaccggtgggttatgcgcatgattgtcagttggtggaaaaactccccgttgaagagtgggatatccctcttcctgcggtggttacaccgtcgaaagtctgggagtggtaagggcgatacacccgcatcgccctgattgacatcgttgattctttgacctaatttagtgagtaagggtaagggaggattgctcctcccctgagactgactgttaataagcgctgaaacttatgagtaacagtacaatcagtatgatgacaagtcgcatcataacccttctccttcaagccctcgcttcggtgagggctttaccgttacagccccatgctgccctgccatcgtaaatccccattaaataaacacaacgcattgatctgactttgatttattttctggagcagactcgcaaagtagaatgcgcaacgcggcaacggtgtggagaagggataaaaaaacgggcaagtcagtgacctgcccgttgattttcagagaaggggaattagtacagcagacgggcgcgaatggtacccggaatagctttcattgcctgcagcgctttttcggcaacgtcttcgtcggcttcaatatcaataaccacataacccatctgggcggaagtttgcagatattgcgcggcgatgttgacgccctgctcggcgaagattttgttcagcgcagttagcacgcccggacggttttcgtggatgtgcatcagacgacgcccaccgtgcagtggcagcgagacttccgggaagttcaccgcagagagcgttgagccattgtcagaatacttgatcaatttacccgcaacttccaggccgatattctcctgcgcttcctgagtcgaaccgccaatgtgtggcgtcagaaggacgttgtcgaattcacacagcggagaggtaaatggatcgctattggtcgccggttccgtcgggaatacgtcgattgccgcccccgccagatgtttgctcgccagcgcatcacacagcgccggaatatccaccacagtaccgcgcgaagcattaatcagcagcgagccgggcttcattagtgaaatttctttcgcgcccatcatatttttggtggacggattctctggtacatgcagactcaccacatcgctcatattcagcaggtcagaaagatgctgtacctgagtggcgttgcccagcggcagtttattttcaatatcataaaagtaaacatacattcccagcgattcagccagaatgcccaattgcgtaccaatatgaccgtagccgatgatacccagctttttgccgcgcgcttcaaaagaacccgccgccagtttgttccacacgccacggtgcgctttagcattggcttccggcacgccgcgcaatagcagcagcagttcgccaatcaccagctccgcaacagagcgcgtatttgagaacggtgcgttaaataccgggatcccgcgctttgccgccgcatccagatcaacctggtttgttccgatacagaaacagccaatagcgaccagtttttctgcggcgttgatcacgtcttcagtcagatgggtacgggatcgcaggccgatgaagtgggcatcgcggatggattcttttaattgttcatcatccagcgcgcctttgtgaaattcgatgttggtgtaaccagctgcacgaaggctttccagcgccttttggtgcacgccttctaccagcagaaacttaatcttgtctttctccagcgatacctttgccatttacccaatcctgtcttttgaaatgttgtgtgcggatttgcatccgcctttcaacatatcaaaaaataatattgcggcaatatgaacgtttgcgtcgcgatgttgaggaaatatcacgcaaaggtaattcttggatgaatatgctggtttagaggatttatttagagcaatcgacaattgcctggtaaaagcgtgacacatgtcaccaaatttaatgaagagaatttttttaacgggggaggttcccccgtcagatcatttcacaatggttttgacaccgtcaggtgtgccaatcagcgcaacgtccgcgccacggttagcaaacaagccaacagtcaccacgccaggaatcgcatttatggcgttttccatcgctatcgggtcaaggatttccatgccgtggacgtcgaggatcacgttgccattatcggtcaccacgccctgacggtattccggacgaccgcccagtttcaccagctgacgcgccactgcactacgtgccatcgggataacttctactggcagcgggaatttacccagaatatcaacctgcttggaagcgtctgcaatacagataaatttttctgcaaccgaagcaatgattttttcacgggtcagcgccgcgccgccgcctttgatcatttgcatgtggccgttgatttcatctgcgccatcaacgtagatgccaaggctgtcgacttcgttgagatcaaaaacgtgaatgccgaggcttttcagtttttcagtggaagcatctgaactggaaacggccccttcaatctggcctttcattgtaccgagcgcgtcaataaagtgtgcggcggtggaacctgtacctacaccaacaatggtgccgggctgaacatactgaagtgccgcccatcctactgcttttttcaattcatcctgcgtcatgatcgtttcgcctgtggtatgaaatttcacacgcattatatacaaaaaaagcgattcagaccccgttggcaagccgcgtggttaactcatccataaaatatcgcgcaatggcaggcatcccctttcgccccgcaaataaagcatacaacggtctgggtatgccgctccacggtgcaaacaggcgcaccagttcaccgttcgcaagcccctgtttacaggcaaattgaggcaataacgccacgccattcaacacaaccagggcgcgaactcgctgagcgaaatgcattagcgcaaatccctgatcttttaagctgcgcttttaaccacggatacaaatgttacccgccgacggcttcggtatatgcaacctgacacaaaattgtgtcatagtgcaggaaaaagcatttaccaggagcagacaacagcaatgaaacgcccggactacagaacattacaggcactggatgcggtgatacgtgaacgaggatttgagcgcgcggcacaaaagctgtgcattacacaatcagccgtctcacagcgcattaagcaactggaaaatatgttcgggcagccgctgttggtgcgtaccgtaccgccgcgcccgacggaacaagggcaaaaactgctggcactgctgcgccaggtggagttgctggaagaagagtggctgggcgatgaacaaaccggttcgactccgctgctgctttcactggcggtcaacgccgacagtctggcgacgtggttgcttcctgcactggctcctgtgttggctgattcgcctatccgcctcaacttgcaggtagaagatgaaacccgcactcaggaacgtctgcgccgcggcgaagtggtcggcgcggtgagtattcaacatcaggcgctgccgagttgtcttgtcgataaacttggtgcgctcgactatctgttcgtcagctcaaaaccctttgccgaaaaatatttccctaacggcgtaacgcgttcggcattactgaaagcgccagtggtcgcgtttgaccatcttgacgatatgcaccaggcctttttgcagcaaaacttcgatctgcctccaggcagcgtgccctgccatatcgttaattcttcagaagcgttcgtacaacttgctcgccagggcaccacctgctgtatgatcccgcacctgcaaatcgagaaagagctggccagcggtgaactgattgacttaacgcctgggctatttcaacgacggatgctctactggcaccgctttgctcctgaaagccgcatgatgcgtaaagtcactgatgcgttactcgattatggtcacaaagtccttcgtcaggattaatccatcaaataatgcctgatagcacatatcaggcgttgtcctcacttctttttgtattccttgaatcacatcacaaaatagacaaatctcaggcggcaaaaaacgacgtctgaatgcattttttttgctggcgacaaacccacgtaaaaagctcaccgtaggcgcaaataccctcattttgattgcgttttacggagcaaataatgtctaacgtgcaggagtggcaacagcttgccaacaaggaattgagccgtcgggagaaaactgtcgactcgctggttcatcaaaccgcggaagggatcgccatcaagccgctgtataccgaagccgatctcgataatctggaggtgacaggtacccttcctggtttgccgccctacgttcgtggcccgcgtgccactatgtataccgcccaaccgtggaccatccgtcagtatgctggtttttcaacagcaaaagagtccaacgctttttatcgccgtaacctggccgccgggcaaaaaggtctttccgttgcgtttgaccttgccacccaccgtggctacgactccgataacccgcgcgtggcgggcgacgtcggcaaagcgggcgtcgctatcgacaccgtggaagatatgaaagtcctgttcgaccagatcccgctggataaaatgtcggtttcgatgaccatgaatggcgcagtgctaccagtactggcgttttatatcgtcgccgcagaagagcaaggtgttacacctgataaactgaccggcaccattcaaaacgatattctcaaagagtacctctgccgcaacacctatatttacccaccaaaaccgtcaatgcgcattatcgccgacatcatcgcctggtgttccggcaacatgccgcgatttaataccatcagtatcagcggttaccacatgggtgaagcgggtgccaactgcgtgcagcaggtagcatttacgctcgctgatgggattgagtacatcaaagcagcaatctctgccggactgaaaattgatgacttcgctcctcgcctgtcgttcttcttcggcatcggcatggatctgtttatgaacgtcgccatgttgcgtgcggcacgttatttatggagcgaagcggtcagtggatttggcgcacaggacccgaaatcactggcgctgcgtacccactgccagacctcaggctggagcctgactgaacaggatccgtataacaacgttatccgcaccaccattgaagcgctggctgcgacgctgggcggtactcagtcactgcataccaacgcctttgacgaagcgcttggtttgcctaccgatttctcagcacgcattgcccgcaacacccagatcatcatccaggaagaatcagaactctgccgcaccgtcgatccactggccggatcctattacattgagtcgctgaccgatcaaatcgtcaaacaagccagagctattatccaacagatcgacgaagccggtggcatggcgaaagcgatcgaagcaggtctgccaaaacgaatgatcgaagaggcctcagcgcgcgaacagtcgctgatcgaccagggcaagcgtgtcatcgttggtgtcaacaagtacaaactggatcacgaagacgaaaccgatgtacttgagatcgacaacgtgatggtgcgtaacgagcaaattgcttcgctggaacgcattcgcgccacccgtgatgatgccgccgtaaccgccgcgttgaacgccctgactcacgccgcacagcataacgaaaacctgctggctgccgctgttaatgccgctcgcgttcgcgccaccctgggtgaaatttccgatgcgctggaagtcgctttcgaccgttatctggtgccaagccagtgtgttaccggcgtgattgcgcaaagctatcatcagtctgagaaatcggcctccgagttcgatgccattgttgcgcaaacggagcagttccttgccgacaatggtcgtcgcccgcgcattctgatcgctaagatgggccaggatggacacgatcgcggcgcgaaagtgatcgccagcgcctattccgatctcggtttcgacgtagatttaagcccgatgttctctacacctgaagagatcgcccgcctggccgtagaaaacgacgttcacgtagtgggcgcatcctcactggctgccggtcataaaacgctgatcccggaactggtcgaagcgctgaaaaaatggggacgcgaagatatctgcgtggtcgcgggtggcgtcattccgccgcaggattacgccttcctgcaagagcgcggcgtggcggcgatttatggtccaggtacacctatgctcgacagtgtgcgcgacgtactgaatctgataagccagcatcatgattaatgaagccacgctggcagaaagtattcgccgcttacgtcagggtgagcgtgccacactcgcccaggccatgacgctggtggaaagccgtcacccgcgtcatcaggcactaagtacgcagctgcttgatgccattatgccgtactgcggtaacaccctgcgactgggcgttaccggcacccccggcgcggggaaaagtacctttcttgaggcctttggcatgttgttgattcgagagggattaaaggtcgcggttattgcggtcgatcccagcagcccggtcactggcggtagcattctcggggataaaacccgcatgaatgacctggcgcgtgccgaagcggcgtttattcgcccggtaccatcctccggtcatctgggcggtgccagtcagcgagcgcgggaattaatgctgttatgcgaagcagcgggttatgacgtagtgattgtcgaaacggttggcgtcgggcagtcggaaacagaagtcgcccgcatggtggactgttttatctcgttgcaaattgccggtggcggcgatgatctgcagggcattaaaaaagggctgatggaagtggctgatctgatcgttatcaacaaagacgatggcgataaccataccaatgtcgccattgcccggcatatgtacgagagtgccctgcatattctgcgacgtaaatacgacgaatggcagccacgggttctgacttgtagcgcactggaaaaacgtggaatcgatgagatctggcacgccatcatcgacttcaaaaccgcgctaactgccagtggtcgtttacaacaagtgcggcaacaacaatcggtggaatggctgcgtaagcagaccgaagaagaagtactgaatcacctgttcgcgaatgaagatttcgatcgctattaccgccagacgcttttagcggtcaaaaacaatacgctctcaccgcgcaccggcctgcggcagctcagtgaatttatccagacgcaatattttgattaaaggaatttttatgtcttatcagtatgttaacgttgtcactatcaacaaagtggcggtcattgagtttaactatggccgaaaacttaatgccttaagtaaagtctttattgatgatcttatgcaggcgttaagcgatctcaaccggccggaaattcgctgtatcattttgcgcgcaccgagtggatccaaagtcttctccgcaggtcacgatattcacgaactgccgtctggcggtcgcgatccgctctcctatgatgatccattgcgtcaaatcacccgcatgatccaaaaattcccgaaaccgatcatttcgatggtggaaggtagtgtttggggtggcgcatttgaaatgatcatgagttccgatctgatcatcgccgccagtacctcaaccttctcaatgacgcctgtaaacctcggcgtcccgtataacctggtcggcattcacaacctgacccgcgacgcgggcttccacattgtcaaagagctgatttttaccgcttcgccaatcaccgcccagcgcgcgctggctgtcggcatcctcaaccatgttgtggaagtggaagaactggaagatttcaccttacaaatggcgcaccacatctctgagaaagcgccgttagccattgccgttatcaaagaagagctgcgtgtactgggcgaagcacacaccatgaactccgatgaatttgaacgtattcaggggatgcgccgcgcggtgtatgacagcgaagattaccaggaagggatgaacgctttcctcgaaaaacgtaaacctaatttcgttggtcattaatccctgcgaacgaaggagtaaaaatggaaactcagtggacaaggatgaccgccaatgaagcggcagaaattatccagcataacgacatggtggcatttagcggctttaccccggcgggttcgccgaaagccctacccaccgcgattgcccgcagagctaacgaacagcatgaggccaaaaagccgtatcaaattcgccttctgacgggtgcgtcaatcagcgccgccgctgacgatgtactttctgacgccgatgctgtttcctggcgtgcgccatatcaaacatcgtccggtttacgtaaaaagatcaatcagggcgcggtgagtttcgttgacctgcatttgagcgaagtggcgcaaatggtcaattacggtttcttcggcgacattgatgttgccgtcattgaagcatcggcactggcaccggatggtcgagtctggttaaccagcgggatcggtaatgcgccgacctggctgctgcgggcgaagaaagtgatcattgaactcaatcactatcacgatccgcgcgttgcagaactggcggatattgtgattcctggcgcgccaccgcggcgcaatagcgtgtcgatcttccatgcaatggatcgcgtcggtacccgctatgtgcaaatcgatccgaaaaagattgtcgccgtcgtggaaaccaacttgcccgacgccggtaatatgctggataagcaaaatcccatgtgccagcagattgccgataacgtggtcacgttcttattgcaggaaatggcgcatgggcgtattccgccggaatttctgccgctgcaaagtggcgtgggcaatatcaataatgcggtaatggcgcgtctgggggaaaacccggtaattcctccgtttatgatgtattcggaagtgctacaggaatcggtggtgcatttactggaaaccggcaaaatcagcggggccagcgcctccagcctgacaatctcggccgattccctgcgcaagatttacgacaatatggattactttgccagccgcattgtgttgcgtccgcaggagatttccaataacccggaaatcatccgtcgtctgggcgtcatcgctctgaacgtcggcctggagtttgatatttacgggcatgccaactcaacacacgtagccggggtcgatctgatgaacggcatcggcggcagcggtgattttgaacgcaacgcgtatctgtcgatctttatggccccgtcgattgctaaagaaggcaagatctcaaccgtcgtgccaatgtgcagccatgttgatcacagcgaacacagcgtcaaagtgatcatcaccgaacaagggatcgccgatctgcgcggtctttccccgcttcaacgcgcccgcactatcattgataattgtgcacatcctatgtatcgggattatctgcatcgctatctggaaaatgcgcctggcggacatattcaccacgatcttagccacgtcttcgacttacaccgtaatttaattgcaaccggctcgatgctgggttaatgactcgtcccgtcacgatcttcagcaatatgctgaagcatcgtggcggtataacgatgatttctgattgaataaagatattcctgcatatacatcggcctgtgcggtgcatcaaaatatttcagcgttgccggattcaccagtcgccaggcaaaatgcgggatcaccgtcagaaaatgtccgcgctccacggcgctgattttggccataaaactgtagggacgataaataatggttggattgatcccacaaggtcgcatattcgcatcaatcattgcttcgaagttggcccggttctgaaagcgcatttgtagccagggcagctcctgaagcagctcttgctcttgtcgctcttcataacggcgagaaacgagaaagcctaatcgcagcggtggtagttcactgatagtcaggttttccagttcctgaactcgtgcagatacatgctgtggggagataataaaatctaactggcggtcaaaaagattatcgataacgccattttcgctgaactcaactggctgggcggtcacgccttcatacttatctccgagactaatcaactgatcgaaaataattgtcggataagtattatctatgccaatcacaatttctcgtgaacgacgccctgagttatggatttcattatcaatcgcagaaagccgttgataaaccgggaacagtttttgatacagttcctgtccggctttattgaggctgatattattatctttgcgggtaaatagcgtatagccaatttgttcttccagcgcggcaatgcttttaccaaatggcgaagccgtcatatggattttttctgccgcccgggcaatattattggtttgcgctaataaaatgaaattgcgcatctttttcgaaataaaaatgtccatccccctcccccgcatccttgtccgcttaaccgtttcagtcagcctatccttgatgaaaccgcgagcaaagataggtgattacgtcatggttttacagaaaattacagaaaaaggaggcaatatcgggtaaaggcattagcccgacgaatacgtcgggctacaaatattattgtgctgcaggtgttttagcgggttgttgatccacaggttctaactggaagaccacatcgacctgatcatcaaactgaatagcggcctgctcgtaagtttcctgggcggacaccggcgcggcatcggctttcatcatccgcaccattgggctgggctgatagttggaaacatggtagcgcacgctatataccggccccagtttacgatgaaagccgttcgccagttcctgcgcctgatgaatcgcgttatcaatcgctgccttacgcgctttgtctttataggcatccggctgcgccacgcccagcgacacagaacgaatttcgttaagacccgccttcagcgcgccatccagcaaggaattcagtttgtctaactgacggagcgtgacttccaccgttctcacagcgcggtagcctttaaggatacttttaccatcctgataatcataatctggctgggtgcgtaagttcgctgagctgatatcttttttcgcgatctgattgagttcaaggaaggaaatgtattgtgcgacgcgctcatctgcctgtttcttggcagtagcggcatccttcgcggccacgttaacttcaatcgcaagagtggcaatgtctggcaccgcatccacgcttgccgtaccggaggtgacaatatgcggtccatccggcaattcgttagcctgcgctgccatcccgctaatacccattaatgccgccagggcgataactttgaacttcacgttagtctctccgtgttaattgacttgcccaaaattcaggacctctggaggcaagcttagcgcctctgttttatttttccatcagatagcgcctaactgaacaaggcttgtgcatgagcaataccgtctctcgccagctgcaaggcaataaaccacataacacatcccacaaccagattgataatgcgctgtgcttttgccgtgcgcagacgcggtgccagccaggctgcgagaagagccagaccaaagaaccacaggaaagaggcgctaattgtcccgagtgcaaaccagcgttttggttccacatcaagttgcccgccaaggctgcccagtacaacaaaagtatccaggtaaacatgcggattcagccaggtcactgccaacatggtggcgataattttccatctgccttgcttcatgacttcggcgctggctaactcaatattactgctcattgctgttttaaaagcgccaaaaccataccacagcaagaaggctacgccgccccaggtgaccagcgccagcaaccacggcgactgcatcaataacgcgctgccaccaaaaatcccggcgcaaatcaggaccaaatcgctgatagcacaaagtaaggcaatcataatgtggtactgacgacgtatgccctgattcatcacaaaagcattttgtggaccgagcggtaggatcatagccgccccaagtgcaagaccttgaaagtaataagaaaacacgttggatattccgaattaagtatctgatgcagagactatatcgcgggattgttattagcggaaattgataatattaattggcaatcagaaaaactaataagagagaggccagagagtattatctggcctcagcgttgattacgcagctttgtcttctttcacccgcttaaagttcacatccatttgcgggtacgggaagctgataccggcggcatcaaattcacgtttaatacgctccagcacatcccagtacacgttttgcagatcgccgctgttgctccagacgcggaccacgaaattaatcgacgatgcaccaagttcgttcaggcgcacagtcatttcgcgatctttcaaaatgcgatcttcagactggataatattggtcaggatctgcttaacctgatcgatatcggaatcatacgccacgccaataataaattcgttacggcgaactggctcgcgggagaagttaataatatttccggcaataattttaccgttcggaataacgataattttaccgtctgcagtacgcatggtggtggagaaaatctgcacactcagcacagtaccggctacgccgcccaggtcaacatattctccggcacggaacgggcggaacatgacaagtaacacgccagcggccaggttagacagtgacccctgcaaagccagaccaacagctaagcctgcggcaccgagtacagcaatgactgacgcggtttgtacacccacgcgtcccagtgcagcgattagcgtaaaggcgataataccgtaacggactaatgcagaaagaaaatcagcaacagtggcatcgattttacgggagatcatcaggcgattcaccgcgttggaaatcatccgcgcgataatcaaaccaacgatgatgatcgcgagtgccgccacgatgtttactgcataacttagcagcagcgcctggttagctaccagccagcttcccgcgccgtttatgctatcgacaacattcaaatcttccattcaatattccttttcaactgactcaaaatggagaaatacactccgccgccttatgacgggcagtctgacaagggtaaacaataaagcataattttgccaaatagatcacagatttctcatctgaatcaccttgcttttggcgaaaaaatccccgcagagcggggctcagacagatatcaatgtgcgctttgtcatgccggatgcggcgtgaacgccttatccggcctacaaaaacctgcaaattcaatatattgcaggatacgtgtaggcctgataagcgtagcgcatcaggcaattttgcttttggcgaaaaaaagacccgcagagcgggccttgagataagcagaaaggaatatcttacagaacgtcgatcgcgttcagttcctggaatgctttctccagacgagcgatcatcgaagtctgaccggcacgcagccatacgcgcggatcgtagtatttcttgttcggctgatcttcgcctttcgggttacccagctgaccctgcagataagcttcgttcgctttgtagtagttcagaacgccttcccaggttgcccattgggtatcggtatcgatgttcatttttactacgccgtagcttacggagtctttgatttcctgagcagtagaaccggaaccaccgtggaatacgaagttcaggctgttgtgcggcaggttgtgtttcttggaaacatattcctgagaatcacgcaggatggtcggagtcagaaccacgttacccggcttgtaaacaccgtgtacgttaccgaaggacgctgcgatggtgaaacgcgggctgattttgctcagttcggtgtatgcgtaatcaacgtcttccggctgggtgtacagtgcagaagcgtccatgtggctgttgtccacgccgtcttcttcaccaccggtgcaacccagttcgatttccagagtcatgccgattttggacatgcgctccaggtatttagagcagatttcgatgttctcttgcagagattcttcagacaggtcgatcatgtgagaagagaacagcggcttaccggtagctgcgaagtgtttttcacccgcgtccaacagaccgtcgatccacggcagcagtttcttcgcgcagtggtcagtgtgcaggataaccggaacaccataatgttcagccatctggtgaacgtgatgcgcaccagagatcgcgcccaggatagcagcaccctgcggaacgtcagatttcacgcctttaccagcgataaaggaagcaccaccgttggagaactgaacgataaccggcgctttaactttagcagcggtttccagtacggcgttgatggagtcagtaccgacgcagtttactgctggcagtgcgaagttgttttcttttgctacctggaaaactttctgtacgtcatcaccagtgattacgccaggttttacgaaatcaaaaatcttagacatgtctcttgtcctgtatcgtcgggccttatactcgtcatacttcaagttgcatgtgctgcgtctgcgttcgctcaccccagtcacttacttatgtaagctcctggggattcactctcttgtcgccttcctgcaactcgaattatttagagtatgaaaaattgcgtgctctaaaagcgcgctgaaacaagggcaggtttccctgccctgtgattttttacttcttagcgcgctcttcgagcatcgctactgcaggcagtactttaccttccacgaattcgaggaatgcgccgccgccagtggagatgtaggagattttgtcagcaatgccgaacaggtcgattgctgccagagtgtcgccgccgccagcgatggagaacgcttcgctgtctgcgatagcgttagccacgatttcagtacctttgcggaagttcgggaattcgaacacgccaaccggaccgttccacagaatggttttcgcattcttcaggatttcagccagttcctgagcggaagcatcaccgatatccaggatctgctcgtcagctttcacatcgttaacagatttcagggtagccggtgcagtttcagagaactcggttgctacgcgaacatcagacggaaccgggatgttgcaggtggtcagcagacgtttagcttcgtcaaccaggtcagcttcgtacagggatttacccacatcgtggccttgtgccgcgataaaggtgttagcgataccaccaccaacaatcagctggtcagcgattttagacagggagtccagaacggtcagtttggtagatactttagaaccaccaacgatagccaccatcgggcgagcaggttctttcagtgctttacccagcgcgtccagttcagctgccagcagcgggcctgcgcacgcaacgtcagcgaatttaccgataccgtgagtagaagcctgcgcgcggtgagcagtaccgaatgcgtccattacgaacacgtcacacagtgcagcgtattttttggacagggtttcgtcgtctttcttctcgcctttgttgaagcgaacgttttccagaacaaccagttcaccttcagcaacgtcaacgccgtcgaggtaatctttaaccagacgaaccgggttagacagtttgtctttcaggtagttaacaaccggcagcagagagaattcttcgttgtactcgccttcggtaggacgacccaggtgggaagttaccatcacttttgcgccttgtttcagggccagttcgatggtcggcagagaagcacggatacgcgcgtcgctggttactttcccgtcttttactggtacgttcagatccgcacggataaatacacgtttcccagcaagatccagatcggtcatcttaattacagacatggtgaatcctctcgttgattctaaaagttttgcagacgctgcttgcgtcttacctgaaagcaacagtagccatagctaacgtcgtgtcgagcattcggttagcaaagccccattcgttatcgcaccagaccaacgttttgatcaggtgtgcgccactgacccgggtttgggtgccatcgacaatggcactgtgcggatcgtggttaaaatctacagagaccaacggcaattccgtatagtcaactataccatgaaatgcaccttgtgctgctttttgcagcaacaggttgacttcattggcttttacaggtttcttcaccgtcacgcttaaatcgattgccgtcacatttatggttggcacacgtaccgcaatcgcttcaaagcgatcgttaaattgcggaaaaaatcgtgtgataccggcggccagtttagtatcgaccggaatgatcgactggctggctgcccgggtgcgacgcaggtcaggatggtatgcatcaataacctgttgatcgtgcatggcggagtgaattgtggtcacagtgccggactcaataccgtacgcatcatctaacaatttgatgacgggaattatgcaattcgtggtacaggaagcgttagaaacgatgcggtgttccgcacgaagttgatcctgattgacgccgtaaacaacggtcgcgtcgagatcgttactgccaggatgtgaaaagagcacttttttggccccggcggcaatatgcgcttcgccatgctcgcgggagccatatacgccggtgcagtcgaggactacatcaacgccaagttcacgccaggggagcgattgcagtgaacgttcatgcaatacgcggatggcgtcatcaccaacaaaaagttgatcgcgttcctgtcgtacttcccatgcaaaacggccatggctggtgtcatatttcaacaaatgcgccatgcccgcagcatccgccagttcgttgattgccaccacggtaatttccgcccggcgtccggattcatacaaagcacgaaccacattacgcccgatgcgaccgaagccatttatcgctacgcgtacggtcatagatctcctgcaaggttttccctgagcaaatttgccagacagagtaatccagcaaatcgtccggggaaaccttacctgtcgcaaactgcgactgattggttaattgtcgaacatttaatcgactgaaacgcttcagctaggataagcgaaacgtggaataaaaggaatgtttgtccagccgaagaagacatttatctgactcacatcacacttttatccccttttgtgggaagctttattccaggctggcgtaataataaccctacaataactggaataaattgtcagcttgtgaagtgataccggccttcttcagtcatctctactatcagattggcctgacggctattcatcagcacacgctcgacattggggccatcggtgcgggcataaaatgcttcggctacttgccgcgttaatcctcccgcaattttacgactaatcaagcgctcccgcagaatttgagcaggtgcatgaataaaaatagaaaaatcgcagaaagatgccaactccagccacttttcatcatccagtaacaaccagtttccttcgacgatgacgagtggtgcggtaacgtgcaacgcatcttcaacaggatcatgcttttgtcgatcgtactgcggccacgtacaatccccttccacgacctggcgcagattttccgtcagtttcgcaacgtcaaatgtctctggtgcgcctttgaaggggcgcaattgatgcgcatccagccagctattgtaatggtgaaaaccatccatcgggagcgtctgaatagcgggcagttccgggtcttgttgcgcgagatattcccagaaggtggttagggttgatttacccgtccccggcggagcgcaaagaaaaaccaccgtacgccgctgcggatttaccgtctgtaaggccgccaacatgtgcagcaacggtttatgtacattttcaatctcttcgttctggtactgtgcctgtatcttcagcccattcaccgttaattcaattttcacggcgttaattcctttaaggtggtcgttactgccagcgtcagcgccgttttgaccattccgctaaaacgcgcctctgaccagacggagaaatcagcgaacttcatcgcttttaacgcgtcatagagcatcgcattgcgggttatgctattgacgttgctgataaaatcccaggtcatgtcatcggcaaatccgggcgtttcatcctgttcgttcaggtaatgccagaactgggaaaaatgcgtgatatcggcgtacaaccatttatccattttccccaacgcataaatcaaacgcagtgcaacatcaatatcgtcaagcgggccgctttgggcgagtaacggcttcactgcatattccacgatctcttcatcgttatcgacaaacagcgacggcagaaactggcgtatcccctggagcaaaatggtatgcgcagttttcataaatgaaaataaattgtcctgtgcatccagttgctcaagcacatcatcttctgtcagcgtcgccattggtcttccgatagatcaccatcaatgcagggagtctattatattacacgtttggtccgcgccgccgatcagtaatgtctgcgtccgcaccccattcgccgtctgttggataccgttcaccagctcaccgcccgtcacgcccgtagcgctaaagaggatatcgttccccctcaccagttcatcgagcgagtacacacggttaacgtcaacgcccattgccttgcaacgcttgcgctcctgctctgcaatctgccgattttccgtgtaatcccctttagcctggcaaaagtcaatcagctcggcctgcatatccccgcctaatgctttaacggcacaggcagaaatcacgccttctggcgcaccgccgatggtgtacatcacatcgtaaggattatcctgccagcaggtcagcacgctggcggcgacatcgccatccggcagggcaaaaaccttcacgcccagctgtgttgcttcctcaatcgcggcactcaggcgcggtttatccagcgtaaccatgcgcagcttatccagcggtttgcctaacgctttcgccacgttgcgcaggttgtccgtcagaggcaaagacagatcaatcgcgcccgccgccagccgattaacaaccagctttttcatatacatatcgggcgcatgtaacaggctatctcgaggggcgaaagccatgaccgccagcgcattgctctgccccatcgccaccatccgcgtgccttcaatgggatcaaccgcgatatcgacttctggcccatcgcctttgcccacctcttcgccaatccacagcatcggcgcatggtcaatttctccttcgccgataaccactcgtccacgaaaagcgacgtcgtttaatgcctggcgcatcgcggtgaccgccaggccatcaattttatttttgtcgccacatccggtttgcggccaggcagccaacgctgcctgttccgtaacgcgaaataatggccacgccagggacatcattgcgcggcctccccgatatcaacgccaaattgtgccagcagatatttctcggcctgttcattccagatgccgtgcgtttcctcaaccagccgcgccaactctttaaacagcggatcggttttgcctttttcggcaaaatcggcaatggcagtgagcggcatggtcacgccgttataaatgagttttttaccgccagggatatccggcagattgagcacggtttctggcaccgcatccaggccaccgatatgggtcaccataaacgacggctgtaactgcccagtggcgctaagggcaatcgcctctttcatgtcgtccgttgaaccgccagatgtaccgacgacgtgcgtgctgttgtaatggacgttgtagaaattaaacggcactttgaagtttttatccgtcggcccggcaaagaagttcagacagccatcttccgccagtaattcatcagccatctcaacgacagcaggcaccgccgcataaacaaaaatgtcatcgaacccggcatctcctgtcagcgcccgcagcatctggacaggatcgctcatccctttggtattcacatacaccagctcaatgcctttactggccgccagttccaccggcagcagcttctgtacctgcgccagacgtttgtcgtcgatatcgaccaccaccacccgcgacggttgtatgccgccgttaatggcgtaatcgatagcgccaatgcccatcggacctgcacacgccagcagtgcaatattgccgccaggtttgacgcccatgcgatgctcataaacatattgcgtggtgtgataattggcatgataagcaccaataatgcagcacataggctctgccagcgacgccgcagcaaaataagagccgtgatacggtaatacgcagcccaaattaatggcgatttcgggaataatcatataagtggcattgccgccaaaatattcgtagctgtagcccgctgaatatccgcttggtaaccccatcgccggttgcaatacaaaacgctggccttttttatatttgccagtgagatttttacccacttcgacaataaccccggcacattcatgcccggtaatgaccggatgattttctaaatcgtcgggtacgcgtttatgttcactaccgagtaacgccgctttccaggtcgataaacagacgctgtcagaaattacactcaccagtaattcattatcggtaatttctggcagttcaaatacgcgcagacggacatcccgcttgccataaatagcagcaactttggttttcatttttacctctgtaatcagtgtttatgttcggcggttaattgattaaataaagtgtcgagttttggatcgccaatatagttattaatcaatatcagtggtttatccgtcacacgtttcacgcgcccttccagactggcatgagtaacgacgatatccgcatccgcaggcacgttttctatggcgtaatgttttacttcaattgccagccccgctttttccaggcgtttacggaaggtggtcgcgcccatcgcactggagcccatccccgcatcgcaaacaaaggcgatacgcttaaccctgcttaacgagaatgcaccctcttgtttcatcgccttaaccgcattggctgactgagcaaactcatcttcgctctccgtttccaccgttttttccatcttcagtatcagcgaagtaatagcaaaggacaccagggtacctaccgtaacaccggcaattgtcgccaggaacgagcctttcggcgtcagtgccaggtaagcaaagatagaccccggacttgggccagccaccagaccaccgtccagtaagttaaacatccaggtgccagacataccgcccgcaatcatggcaataatggtcagcggcttcatcagcacatacgggaaatacagttcgtggatcccaccgaggaagtgaataatcatcgccccgggcgcagaacgtttactcatccctttaccaaacaaggtaaacgccagcagcagccccaggcccggacctgggttagaggccaccataaagaagatggatttaccgttaaccgaagcctgttgcattcccagcggataatagacgccctgatcgatcgcattattgaggaaaagcactttcgccggttcattgatgactgacaacaatggcagataacccgcatgtaccagcgcctcaatacactctttgacgaaagtattggcaattaacaccgccgggccgataacttcaaaacccagcagacaaaggagcatccccgcgatacctaatgagaagttattgataaccatctcaaaaccggcaggtatgcgtttttccagtgccttatcgacatattttatgaccaacccaccgagcggccccatgatcattgagccaaggaacatcgggatctctgcgccaacgatcacaccaatagtacctattccgcccatgaccgccccgcgtttaccgccgaccagatgaccacctgtagaaccaatcatcacgggcaataaataggtaatcatcgggccgacaattttggcgaaatgttcgttaggcagccaaccggtgggaataaataacgcagtaataaaaccccaggcaataaaagcaccaatattggggatgaccattgcagtcaaaaagcccccaaaagcctggacctttgcacgagcagacttgttttccataatattatcctgtagaggagagagtaattatccgcggctgataatgtccgctaattgtttttctgatgatgctgttaagagttgttcgagtatttcttcttcgcacagtaattcacttaacgcctgaatagcgccaatgtgcgaatcggcatcggcagcagagagtccgatgagtaatttaattggttcgtcattccccggaaaataaacaccttgttcaagtaatgtcaaagacatcccggttttaagcgccccacattccggtcgcgcatgaggcattgccacgcctggtgcgagaatataataagggccattgttaatggtggaatctttaattgcctgaatgtaattctcgctgatatagtttttatccagcaatgataccatcgagaaatcgatagcttcctgccaatcttttgctgaatgtataactgagattgatgattctggaaaataatcactaagccgcataaattatccttattttatttttagggtaccgtccggcggtaaaaataaaatactcgtgcggtttaatgaaagcaattgagcagggaaaccggtgttttgaaaacagtgaattattaatttcttatataacattgagttatagatataacaacaaatgtcaatacgcatatcgtgatgcatattacataattgatatttattgcatataaatatttgtgatctacaacacgccttatctattgcttgtccgcaaacggacatatcaaggtaataaaaaaggtcgccgaagcgacctttttacccgaaatgctaattacagcagttcttttgctttcgcaacaacgttatcaacagtgaagccgaactcttcaaacagcagctctgccggagcagattcaccgaaggtggtcataccgacgatagcaccgttcaggccaacatacttgtaccagtagtcagcaatacccgcttctacagcaacgcgtgcagtaaccgctttcggcagtacggattcacggtaagcagcatcctgcttgtcaaatgcgtcggtagacggcatggacaccacgcgcgctttcacgccttcggcagtcagtttttcgtaggcagcaacagccagttcaacttctgaaccggtagcgatgaaaatcagttccggctgaccggcgcagtctttcagcacataaccaccgcgcgcgatgtttgccagttgctcttcagttcgttcctgctgcgccaggttctgacgggagaggatcagtgcggtcgggccgtcctgacgctcaacaccgtatttccacgcgaccgcggattcaacctggtcacacggacgccatgtagacatgttcggggttacgcgcagagaagcgacctgctcaaccggctggtgagtcgggccgtcttcgcccagaccgatggagtcgtgggtgtaaaccatcacctgacgctgtttcatcagcgcagccatacgtacggcgttacgtgcgtattccacgaacatcaggaaggtggaggtgtacggcaggaagccaccgtgcagggagataccgttagcaatcgcggtcataccgaactcgcgaacaccgtagtggatgtagttacccgcagcatcttcgttgattgctttagaaccagaccacagggtcaggttagacggcgccaggtcagcagaaccgccgaggaattccggcaacagcggaccgaacgcttcgatagcattctgagacgctttacggctggcgattttcgccggattagcctgcagtttagcgatgaactctttcgctttagcgtcgaagtcagacggcatttcgcctttcatacggcgggtaaattcagcggcttcctgcggataagctttcgcgtaagcagcgaatttctcgttccatgcggattctttcgcctggcctgcttctttcgcatcccactgagcatagatttcagacgggatttcgaacggcgcatatttccagcccagttgttcgcgggtcagggcaatttcagcgtcgcccagcggcgcaccgtgggagtcgtgggtaccggctttgttcggggaaccgaaaccgatgatggttttgcacatcagcagggaaggtttgtcagtcactgcgcgcgcttcttctactgcgcgtttgatagatgccgcgtcatgaccgtcgatgtcgcgaataacgtgccagccgtaagcttcgaaacgcattgcggtgtcgtcggtgaaccagccttcaacgtgaccatcgatagaaataccgttgtcatcgtagaatgcaatcagtttacccagcttcagcgtacccgccagagagcaaacttcgtgggagatgccttccatcatgcagccgtcgcccatgaaggcgtaggtgtagtggtcgacaatgtcgtggcccggacggttaaactgcgccgccagcgttttttctgcaatcgccataccgactgcgttggcaataccctgacccagcggaccggtggtggtttccacaccagcggtgtaacccacttccgggtgacccggagttttagagtgcagctgacggaagtttttcagttcttccatcggcagatcgtaaccggtgaggtgcagcaggctgtagatcagcatggagccgtggccgttggacagcacgaagcggtcacggtcagcccaggacggattctgcgggttgtgtttcaggaaatcacgccacaggacttcggcaatgtcagccatacccataggggcacccgggtgaccggatttggctttctgtactgcgtccatgctcagcgcacgaatagcattggcaagctctttacgtgaggacattttgactccagatcggatgatgaagggcacgcccttaacgacttgacgacagcgcgttttgggctacgccggaaaatttgccaacaatttaccgcaagccgcgcgtcatgtacatggaacatccttttgccgcttcagaaatctctggatcatgctcgcatgttgcgcaatctactcgcccgtccgctgcgcttttccttatactgagactgagcgtcgattcacctgcaaacggcgcatttttagaataatcctgaccttgtgcggaagagaaaacatgaaaattcgcgccttattggtagcaatgagcgtggcaacggtactgactggttgccagaatatggactccaacggactgctctcatcaggagcggaagcttttcaggcttacagtttgagtgatgcgcaggtgaaaaccctgagcgatcaggcatgtcaggagatggacagcaaggcgacgattgcgccagccaatagcgaatacgctaaacgtctgacaactattgccaatgcgctaggcaacaatatcaacggtcagccggtaaattacaaagtgtatatggcgaaggatgtgaacgcctttgcaatggctaacggctgtatccgcgtctatagcgggctgatggatatgatgacggataacgaagtcgaagcggtgatcggtcacgaaatggggcacgtggcgttaggccatgtgaaaaaaggaatgcaggtggcacttggtacaaatgccgtgcgagtagctgcggcctctgcgggcgggattgtcggaagtttatctcaatcacaacttggtaatctgggcgagaaattagtcaattcgcaattctcccagcgccaggaagcagaagccgatgattattcttacgatcttctgcgccaacgcggcatcagcccggcaggtcttgccaccagctttgaaaaactggcaaaactggaagaaggtcgccaaagctcaatgtttgacgaccatcctgcatccgccgaacgcgcccagcatattcgcgatcgcatgagcgcggatgggattaagtaaagcctggtggtgtcgaacgtaggtcagataaggcgttcacgccgcatctgacatgaatggcacatttgttaccttgtgcgcattgccggatgcgatgctggcgcatcttatccggcctacgggtgccgaacgtaggtcggataaggcgttcacgccgcatccgacattaatggcacgttttacccgtgcgcatcgcatctggtgcttactcgccctttttcgccgcctgaatatacagcatttccagcgccagcgttgccgctgccagagcagtgatttccgactgatcgtatgccggagccacttccactacgtccatcccaacaatgttgagatctttcaggccgcgtaccagtttaatagcgcgatcggaggtcaggccgccaatcactggcgtaccggtgcctggtgcaaaagcaggatccaggcagtcgatatcaaaagtcaggtaaaccggcatatcacccacaatctgtttcacttgggcgataacgtcatccacgctgcgatcgttcacctggcaggcgtccagcacggtaaagccgttgtctttatcaaactcggtacgaataccaatctgcacggaatgattcgggtcgatcagaccttctttcggcgcggtatagaacatagtgccgtggtcaaattcacaaccgttcgcataggtatcggtgtgggcgtcaaagtgtaccagcgccattttgccgaaatgcttcgcatgagcacgcagcagcggcagcgtaacaaagtggtcaccaccgaaagagagcatacgcttaccggcagccagcagcttctcggcgtgcgcctgcagcttttcgctcatctcacgggcatcgccaaaggcatataccagatcgccgcagtccacgacgttcagacgctcacgcatgtcgaaattccacgggaagcggttgtgttcccaggccagattcgtcgaaacctgacggatcgctgccggaccgtggcgaccacccgcacgaccagaagtggccatatcgaacggcacgccagtaatcacccagtctgcatcgctgtcatacggctggaagttcatcggcaggcgtaaaaaaccaaaggcattggaaaccagtgagttatcgtattgatgacctaaggtgctcatggatggactcctattacaaagtcgatataaaaaaacccttccgcgtcgttaggcccgacgaggaagggttggatttgtcacaataaattgtggcggattatcaccgctaaattaagcggattcaagtaacacaggacttactcatcttcaagataagtataaccgtacaaacctgcctcgaactcttcaaggaactgttgttgcagttcagcatcaagatcggttttcttcacttgatcgcggaactgggttaacagcgttttcggatcgagctgtacatattgcagcatgtccgccacggtatcgccttcgtcagacagttctacttctacgctaccgtcagggaagacgaacacgtcaaccgcttcggtatcaccgaacaggttgtgcatgttgccgaggatctcctgatatgcgccgaccataaagaaaccgagcatcggcggattctctggatcgtactccggcattggcattgtcgtggcaataccgtcaccatcaatatagtggtcgatagcaccgtcagagtcacaggtaatatccagcagcacagcgcgacgttccggcacttgatccagcccttccagcggcagaaccgggaacaactggtcgatcccccatgcgtccggcatcgactggaacagcgagaagttgacgtacattttgtccgccatacgttcctgcagctcgtcgataatcggacgatgagcacggttttgcggatccagctgcttttgcacttcatggcacatgctcaaataaagctgctcagcccatgcacgttcttgcaggctaaagatgccggaagagtagccgatatgaatgtcgtgcagatccatctgactgtcgtgtaaccattcacgcagagaacggcgagttcccggttcgtgcatctcctgccaggtttcccacatgctttgcagcgcgcgcggcgcatcttctgcaggcgcggtcggcaccgtgtattcgttacgttccacgccgatgatattagacaccagcacggtgtgatgcgcagtcaccgcacgacccgattcggtgattaccgtcggatgcggcagaccgttttcttcacacgcatcgccaatcgcccagataatgttgttggcgtattcattgaggccgtagttcaccgaacagtcggactgcgaacgagtaccttcataatccacgcccagaccgccgccgacgtcgaagcactgaatattgacgcccagcttgtgcagttccacatagaaacgcgcggattcacgaacgcctgtcgcgatatcgcgaatattcgccatctgcgaaccgaggtggaagtgcagtagttgcaggctgtcgagacgcccggcttcacgcagggtttcaaccagttgcagtacctgagtcgcagccaggccgaacttcgatttttccccgccggaggactgccatttacccgaaccctgcgaagccagacgtgcacgcacgcccagacgaggaacgacattcagacgttctgcttcatccagcacaatggcgatttctgacatcttctcaatgaccagatagaccttgtgccccatcttctcgccaattaatgccaggcggatatattcgcggtctttataaccgttgcagacgatgacgctacgggtcatgccagcatgtgccagtactgccatcaactcggctttggaaccggcttccagacccagcggttcgcccgaatgaatcagggactcaatcacgcggcggtgctggttaactttgatcggataaacaaggaagtaatcgccgttatagccgtaggattccctcgcacgtttgaacgcggcgttaatggaacgcaaacggtgctgcaggatctgtgggaaacagaacagtgcaggcagacgctggccctgtgcttcacgagttttcactaactgcgcgagatcgacgcgagcttccgggacgtccgggtccgggcacacgctaatgtggcccagctcgttaacgtcatagtagttattgccccaccaggcaatattgtaagtacgcagcatcttgctggcttcctgggagctcattgcaacctcctgcatggagcgtagtacaccgtgttcgcccgctgacgaaggcaaacccatagacatgtcgtcagacatagcgaacctcaaattattttattaagtgtaaaacagttaacgactatcgcagcctggaactgcgataacaacccataagcacatggattttccagcagtgaatgctgacgctccaactgcgcaaccggtttctttttcataacattattaagcacataaccgaacgtaagtgtgaaagttcggcgaaaccacgagaaaactcttgtttttacaagagcgcccttgttcagtcctcagtaactgtaaccagctcttgaatcctgagaagcgccgagatgggtataacatcggcaggtatgcaaagcagagatgcagagtgcggggaacgaatcttcaccagaacggtgagacaggttaagcagcagacaacggttcattatttcgtatcacctccacggccgcctgttaagacgaacccacaagccaaaactctgatttcaacccggctggaagtggcaacacgaaagaaacgtcgtgtgctttttatttaagccgcgcgccgcgttttataccccacaatggcagaaaattgcaaaagataaatacgcagaatgccggcattgtcaggaaaaatttccagccacgtttttaacagaatgagacacgattcaaaaaaaagtggaaatagggtgaagaattgacctaaaatagccatccagatgttaatccatccataccgattaacactcagactgccagtgtttttaacctgcagagtcgtggtaggatccgctaccacagaaaatccacacaacagtttgagctaaccaaattctctttaggtgatattaaatatggcaaaacacctttttacgtccgagtccgtctctgaagggcatcctgacaaaattgctgaccaaatttctgatgccgttttagacgcgatcctcgaacaggatccgaaagcacgcgttgcttgcgaaacctacgtaaaaaccggcatggttttagttggcggcgaaatcaccaccagcgcctgggtagacatcgaagagatcacccgtaacaccgttcgcgaaattggctatgtgcattccgacatgggctttgacgctaactcctgtgcggttctgagcgctatcggcaaacagtctcctgacatcaaccagggcgttgaccgtgccgatccgctggaacagggcgcgggtgaccagggtctgatgtttggctacgcaactaatgaaaccgacgtgctgatgccagcacctatcacctatgcacaccgtctggtacagcgtcaggctgaagtgcgtaaaaacggcactctgccgtggctgcgcccggacgcgaaaagccaggtgacttttcagtatgacgacggcaaaatcgttggtatcgatgctgtcgtgctttccactcagcactctgaagagatcgaccagaaatcgctgcaagaagcggtaatggaagagatcatcaagccaattctgcccgctgaatggctgacttctgccaccaaattcttcatcaacccgaccggtcgtttcgttatcggtggcccaatgggtgactgcggtctgactggtcgtaaaattatcgttgatacctacggcggcatggcgcgtcacggtggcggtgcattctctggtaaagatccatcaaaagtggaccgttccgcagcctacgcagcacgttatgtcgcgaaaaacatcgttgctgctggcctggccgatcgttgtgaaattcaggtttcctacgcaatcggcgtggctgaaccgacctccatcatggtagaaactttcggtactgagaaagtgccttctgaacaactgaccctgctggtacgtgagttcttcgacctgcgcccatacggtctgattcagatgctggatctgctgcacccgatctacaaagaaaccgcagcatacggtcactttggtcgtgaacatttcccgtgggaaaaaaccgacaaagcgcagctgctgcgcgatgctgccggtctgaagtaatctttcttcacctgcgttcaaaggccagcctcgcgctggcctttttcttttggataggcgttcacgccgcatccggcaaaaaaaccgcccgcacaataacatcattcttcctgatcacgtttcaccgcagattatcatcacaactgaaaccgattacaccaaccacaacagacaaagatttgtaatattttcatattattattcggttttcacagttgttacatttcttttcagtaaagtcttaattgcagataacagcgtttaatctatgatgatataactcaattattttcatgcacttaaatcataactaagataaatgttagtgtaagcgattacactgatgtgatttgcttcacatctttttacgtcgtactcacctatcttaattcacaataaaaaataaccatattggagggcatcatgcctgacgctaaaaaacaggggcggtcaaacaaggcaatgacgtttttcgtctgcttccttgccgctctggcgggattactctttggcctggatatcggtgtaattgctggcgcactgccgtttattgcagatgaattccagattacttcgcacacgcaagaatgggtcgtaagctccatgatgttcggtgcggcagtcggtgcggtgggcagcggctggctctcctttaaactcgggcgcaaaaagagcctgatgatcggcgcaattttgtttgttgccggttcgctgttctctgcggctgcgccaaacgttgaagtactgattctttcccgcgttctactggggctggcggtgggtgtggcctcttataccgcaccgctgtacctctctgaaattgcgccggaaaaaattcgtggcagtatgatctcgatgtatcagttgatgatcactatcgggatcctcggtgcttatctttctgataccgccttcagctacaccggtgcatggcgctggatgctgggtgtgattatcatcccggcaattttgctgctgattggtgtcttcttcctgccagacagcccacgttggtttgccgccaaacgccgttttgttgatgccgaacgcgtgctgctacgcctgcgtgacaccagcgcggaagcgaaacgcgaactggatgaaatccgtgaaagtttgcaggttaaacagagtggctgggcgctgtttaaagagaacagcaacttccgccgcgcggtgttccttggcgtactgttgcaggtaatgcagcaattcaccgggatgaacgtcatcatgtattacgcgccgaaaatcttcgaactggcgggttataccaacactaccgagcaaatgtgggggaccgtgattgtcggcctgaccaacgtacttgccacctttatcgcaatcggccttgttgaccgctggggacgtaaaccaacgctaacgctgggcttcctggtgatggctgctggcatgggcgtactcggtacaatgatgcatatcggtattcactctccgtcggcgcagtatttcgccatcgccatgctgctgatgtttattgtcggttttgccatgagtgccggtccgctgatttgggtactgtgctccgaaattcagccgctgaaaggccgcgattttggcatcacctgctccactgccaccaactggattgccaacatgatcgttggcgcaacgttcctgaccatgctcaacacgctgggtaacgccaacaccttctgggtgtatgcggctctgaacgtactgtttatcctgctgacattgtggctggtaccggaaaccaaacacgtttcgctggaacatattgaacgtaatctgatgaaaggtcgtaaactgcgcgaaataggcgctcacgattaatctccccaagcttcctcccatcgcggaggaagccacctcttgcagtcatcttttcttcgctctatcctctgccgctatgaaaacatcccgtctccctatcgccatccaacaggccgttatgcgtcgcctgcgggaaaaactcgcccaggccaacctgaagctagggcgtaactacccggagccaaaactctcttacacccagcgcggaacctccgccggaacggcctggctggaaagctatgaaattcgcctcaatcccgttttgctgttggaaaacagtgaagcttttattgaagaagtggtaccgcacgaactggcacatttgctggtatggaaacatttcggccgcgtagcgccacatggcaaagagtggaagtggatgatggaaaacgtgctgggtgttcccgcccgtcgtacgcatcagttcgaactgcaatccgtgcgtcgcaacaccttcccctaccgctgcaagtgccaggagcatcagcttaccgtacgccgccataatcgcgtagttcgtggcgaggccgtctatcgctgtgttcactgcggtgaacagctggttgcgaaataaccatctgaactatcaggaactttcctgatctggctgattgcataccaaaacagctttcgctacgttgctggctcgttttaacacggagtaagtgatgtaccgttatttgtctattgctgcggtggtactgagcgcagcattttccggcccggcgttggccgaaggtatcaatagtttttctcaggcgaaagccgcggcggtaaaagtccacgctgacgcgcccggtacgttttattgcggatgtaaaattaactggcagggcaaaaaaggcgttgttgatctgcaatcgtgcggctatcaggtgcgcaaaaatgaaaaccgcgccagccgcgtagagtgggaacatgtcgttcccgcctggcagttcggtcaccagcgccagtgctggcaggacggtggacgtaaaaactgcgctaaagatccggtctatcgcaagatggaaagcgatatgcataacctgcagccgtcagtcggtgaggtgaatggcgatcgcggcaactttatgtacagccagtggaatggcggtgaaggccagtacggtcaatgcgccatgaaggtcgatttcaaagaaaaagctgccgaaccaccagcgcgtgcacgcggtgccattgcgcgcacctacttctatatgcgcgaccaatacaacctgacactctctcgccagcaaacgcagctgttcaacgcatggaacaagatgtatccggttaccgactgggagtgcgagcgcgatgaacgcatcgcgaaggtgcagggcaatcataacccgtatgtgcaacgcgcttgccaggcgcgaaagagctaacctacactagcgggattctttttgttaacccctaccccacgcgtacaaccgcgtggggagacgacgcggatttttaactatgcgtatcccccgcatttatcatcctgaaccactgaccagccattctcacatcgcgctttgcgaagatgccgccaaccatatcgggcgcgtactgcgcatggggccggggcaggcgttgcaattgtttgacggtagcaaccaggtctttgacgccgaaattaccagcgccagcaaaaaaagcgtggaagtgaaggtgctggaaggccagatcgacgatcgcgaatctccgctgcatattcacctcggtcaggtgatgtcgcgtggtgaaaaaatggaatttactatccagaaatcgatcgaactcggtgtaagcctcattacgccacttttttctgagcgctgcggcgttaaactggatagtgaacgtctgaacaagaagcttcagcagtggcagaagattgcaattgctgcctgtgagcagtgtggtcgtaaccgggtgccggaaatccgtccagcgatggatctggaagcctggtgtgcagagcaggatgaaggactgaaactgaatcttcacccgcgcgccagtaacagcatcaatacgttgccgttaccggttgaacgcgtccgcctgctgattggcccggaaggcggtttatcggcagatgaaattgccatgactgcccgctatcaatttactgatatcctgttgggacctcgcgttttgcgtacagagacaactgcgctcaccgccattaccgcgctacaagtacgatttggcgatttgggctaacggagaagaataatgatcaagctcggcatcgtgatggaccccatcgcaaacatcaacatcaagaaagattccagttttgctatgttgctggaagcacagcgtcgtggttacgaacttcactatatggagatgggcgatctgtatctgatcaatggtgaagcccgcgcccatacccgcacgctgaacgtgaagcagaactacgaagagtggttttcgttcgtcggtgaacaggatctgccgctggccgatctcgatgtgatcctgatgcgtaaagacccgccgtttgataccgagtttatctacgcgacctatattctggaacgtgccgaagagaaagggacgctgatcgttaacaagccgcagagcctgcgcgactgtaacgagaaactgtttaccgcctggttctctgacttaacgccagaaacgctggttacgcgcaataaagcgcagctaaaagcgttctgggagaaacacagcgacatcattcttaagccgctggacggtatgggcggcgcgtcgattttccgcgtgaaagaaggcgatccaaacctcggcgtgattgccgaaaccctgactgagcatggcactcgctactgcatggcgcaaaattacctgccagccattaaagatggcgacaaacgcgtgctggtggtggatggcgagccggtaccgtactgcctggcgcgtattccgcaggggggcgaaacccgtggcaatctggctgccggtggtcgcggtgaacctcgtccgctgacggaaagtgactggaaaatcgcccgtcagatcgggccgacgctgaaagaaaaagggctgatttttgttggtctggatatcatcggcgaccgtctgactgaaattaacgtcaccagcccaacctgtattcgtgagattgaagcagagtttccggtgtcgatcaccggaatgttaatggatgccatcgaagcacgtttacagcagcagtaacccaccttagcgagaaggatctcgttgagactctgagtgacagcgcccttctttccacgcatactgggcgctgttgcttttttgaaccaggaaacagaacctctgacaatgaatttacagcatcactttcttattgccatgcctgctctccaggatccgattttccgtcgttccgtggtctacatttgcgaacataataccaatggtgcaatggggatcatcgtcaacaagccgctggaaaatctcaaaattgaagggattctggaaaagctgaagatcacgccggagccgcgtgatgaatcaatccgtctggataaaccggttatgctcggcggtccgctggctgaagatcgcgggtttattttgcatactccgccctccaattttgcttccagcattcgcatttcagacaacacggtaatgaccacttcccgcgatgtgctggaaacgctcggcaccgataaacaaccgtctgacgtattggtggctctgggttatgcctcctgggagaaaggtcaactggaacaagaaattctcgataacgcgtggctaacggccccggcagatctgaatattctgttcaaaacgccgattgccgaccgctggcgcgaggcggcaaaactgattggtgtggatattctcaccatgcctggtgtggcaggacacgcctgatgagtggaaccttactcgccttcgacttcggcaccaaaagcattggcgtagcggtcggccaacgcattaccggcaccgctcgccctttgcctgcaattaaagcacaggacggtacgccggactggaacattatcgagcgtttactgaaagagtggcagccggacgaaatcatcgtcggtttgccgctgaatatggacggcaccgagcaaccattgactgccagagcgcgtaaatttgccaaccgtattcatggccgtttcggtgttgaagtaaagctccatgacgagcgtcttagcactgtggaagcccgttccggtctgtttgaacagggcggctatcgggcgctcaacaaaggcaaagttgactctgcctctgcggttattattctcgaaagctatttcgagcagggatattaaggcgatttaaacgcctggcggagtgtaaataatatcatcgcgtcttattgccggatgcggcgtgaacaccttatccagcacacatctggcagcggctataggtctgataagacgcgttagcgtcgcatcagacatttattgcctttgtaggcccgataagcttgcgcatcgggcatggcaacgtcacaaacgcccttcccccacccggtgctgataactctgctgaaacgttatcatccccacctgctgcccggtttgaataacatgcggtaactggtgggttttcccttcgcgaatcaaattccccaccgcgggtgtgttaatcagcaattcaaata
